(19) United States
(12) Patent Application Publication
(10) Pub. No.: US 2009/0193532 A1
(43) Pub. Date: Jul. 30, 2009

(54) Genetically Engineered and Phenotyped Mice and Stem Cell Clones for Producing the Same

(76) Inventors: Alejandro Abuin, The Woodlands, TX (US); Joel A. Edwards, Las Flores, CA (US); Charles Montgomery, Jay, OK (US); Carolina Rangel, Houston, TX (US); Arthur T. Sands, The Woodlands, TX (US); Zheng-Zheng Shi, The Woodlands, TX (US); Mary Jean Sparks, Magnolia, TX (US); Peter Vogel, The Woodlands, TX (US); Brian Zambrowicz, The Woodlands, TX (US)

Correspondence Address: LEXICON PHARMACEUTICALS, INC., 8800 TECHNOLOGY FOREST PLACE, THE WOODLANDS, TX, 77381-1160, US

(21) Appl. No.: 12/099,459

(22) Filed: Apr. 8, 2008

Related U.S. Application Data
(63) Continuation of application No. 11/334,806, filed on Jan. 18, 2006, now abandoned.
Application No. 11/334,806 is a continuation-in-part of application No. 10/843,704, filed on May 11, 2004, now abandoned.
Application No. 10/843,704 is a continuation of application No. 09/963,299, filed on Sep. 26, 2001, now abandoned.
Application No. 11/334,806 is a continuation-in-part of application No. 10/875,104, filed on Jun. 23, 2004, now abandoned.
Application No. 10/875,104 is a continuation of application No. 09/880,711, filed on Jun. 12, 2001, now abandoned.
Application No. 11/334,806 is a continuation-in-part of application No. 10/935,709, filed on Sep. 7, 2004, now abandoned.
Application No. 10/935,709 is a continuation of application No. 10/060,069, filed on Jan. 29, 2002, now abandoned.
(60) Provisional application No. 60/237,272, filed on Oct. 2, 2000.
(60) Provisional application No. 60/211,230, filed on Jun. 12, 2000.
(60) Provisional application No. 60/265,585, filed on Jan. 31, 2001.

(51) Int. Cl. A01K 67/027

(52) U.S. Cl. 800/18

(57) ABSTRACT

The current invention relates to genetically engineered mice, cells derived from those mice, and polynucleotides and polypeptides corresponding to genes affected by the engineered mutation. The invention also relates to antibodies raised in a mouse of the invention. The invention further provides methods for using the mice, cells, polynucleotides, polypeptides and antibodies of the invention.

[0001] This application is a continuation-in-part of U.S. application Ser. No. 10/843,704 filed May 11, 2004, currently pending, which is a continuation of U.S. application Ser. No. 09/963,299 filed Sep. 26, 2001, now abandoned, which claims the benefit of U.S. Provisional Application Ser. No. 60/237,272 filed Oct. 2, 2000, now abandoned; U.S. application Ser. No. 10/875,104 filed Jun. 23, 2004, currently pending, which is a continuation of U.S. application Ser. No. 09/880,711 filed Jun. 12, 2001, now abandoned, which claims the benefit of U.S. Provisional Application Ser. No. 60/211,230 filed Jun. 12, 2000, now abandoned; U.S. application Ser. No. 10/935,709 filed Sep. 7, 2004, currently pending, which is a continuation of U.S. application Ser. No. 10/060,069 filed Jan. 29, 2002, now abandoned, which claims the benefit of U.S. Provisional Application Ser. No. 60/265,585 filed Jan. 31, 2001, now abandoned; all of which are incorporated herein by reference.

### 1.0 SUBMISSION ON COMPACT DISC

[0002] The contents of the following submission on compact discs are incorporated herein by reference in their entirety: a compact disc copy of the Sequence Listing (COPY 1) (file name: Lexicon 3423 Listing.txt; date recorded: Jan. 16, 2006; size: 1,380 kilobytes); a duplicate compact disc copy of the Sequence Listing (COPY 2) (file name: Lexicon 3423 Listing.txt; date recorded: Jan. 16, 2006; size: 1,380 kilobytes); and a computer readable form copy of the Sequence Listing (CRF COPY) (file name: Lexicon 3423 Listing.txt; date recorded: Jan. 16, 2006; size: 1,380 kilobytes).

### 2.0 FIELD OF THE INVENTION

[0003] The present invention relates to genotypic and phenotypic analyses of multiple genes in mice for the rapid and efficient development of drugs and therapies. The invention also relates to the individual mutant animal lines and their respective phenotypes, ES cells to generate animals and other cell lines, and antibodies generated in the animals. The massive phenotypic analysis provided by the present invention represents a key breakthrough in making drug development for therapy more efficient and thus faster and more affordable.

### 3.0 BACKGROUND

[0004] The development of new drugs and therapies has traditionally benefited from modeling the disease of interest, typically in a suitable animal species. Species of particular interest share a close evolutional relationship to humans, are physiologically relevant to human disease, are capable of supporting research through short generational cycles, and are scientifically well defined to generate consistent and meaningful data of disease phenotype and physiology of drug effects. For over a century, mice have been recognized as highly suited for drug development.

[0005] Where animal models for disease are sought, they can be obtained by observing phenotypes in animals to find a naturally occurring variant that mimics the pathology of a disease of interest as closely as possible. Ideally, such a variant would be the result of a naturally occurring mutation so that the animal could be propagated for research. Yet, the likelihood of finding such animal models is small and only a limited number of desirable animal models for diseases of interest have been identified this way.

[0006] New ways of generating mouse variants resulted from technologies for engineering mutations into the genome of mice. These technologies facilitate the introduction of changes into the mouse genome, either through random or targeted events. Of particular value is site specific mutagenesis of the mouse genome, especially when combined with the genetic and phenotypic characterization of the resulting mouse variant. Site specific mouse mutants have provided valuable insights that have been key in improved allocation of drug development efforts and thus saved valuable time und ultimately lives.

[0007] Expanding the number of mouse variants with engineered depletion of genomic function would provide additional opportunities for more efficient drug development for therapy. Particularly desirable would be a bank of mouse mutants, each representing a depletion of a particular genomic function, each being characterized as to the specific site of the mutation and the gene affected, and each mutant being characterized on the homozygote, heterozygote, and wild-type level for a number of different physiological parameters for quick identification of most desirable phenotypes for multiple types of diseases. Such a bank of mouse mutants would be especially useful if it included functional depletions for most genes in the mouse genome as that would substantially increase the probability of obtaining a mouse mutant with a phenotype specific for many diseases of interest.

[0008] The present invention provides such a bank of mouse mutants in certain embodiments. More specifically, the present invention provides a bank of multiple mutant mouse lines, representing functional depletions of many genes of the mouse genome, all genetically and phenotypically characterized.

### 4.0 SUMMARY OF THE INVENTION

[0009] The present invention provides in certain embodiments a library or bank of mice (mouse library), each mouse comprising a mutation engineered into its genome, and in certain preferred embodiments, each mouse of the library comprises an engineered mutation that is distinct from the mutation engineered into the other mice of the library (distinct engineered mutation). In certain preferred embodiments, a mouse library according to the invention comprises at least 50 mice with each carrying a distinct engineered mutation, and more preferably at least 100 mice, 1,000 mice, 10,000 mice, or 50,000 mice, each library comprising mice carrying a distinct engineered mutation. The current invention also comprises individual mice and mouse lines carrying an engineered mutation.

[0010] In certain preferred embodiments, a mouse library of the current invention comprises mice that can be bred to be heterozygous and/or homozygous for the engineered mutation. In certain other preferred embodiments, a mouse library of the current invention comprises mice that have been characterized as to the engineered mutation, changes in gene expression, and the phenotype of the mice, preferably heterozygous and homozygous for the engineered mutation. In certain embodiments, the current invention provides animal models for drug development. For example, a mouse of the current invention, in certain embodiments, lacks a genomic function and said function is linked to phenotypic traits affiliated with one or more diseases.

[0011] The invention further comprises cells, for example, an embryonic stem cell (ES cell), a fibroblast, a nerve cell, a muscle cell, any cell derived from an ES cell of the invention. In certain embodiments, a cell of the invention carries an engineered mutation.

[0012] In certain other embodiments, the current invention provides antibodies, and in certain preferred embodiments, antibodies generated using a mouse of the invention.

### 5.0 BRIEF DESCRIPTION OF THE DRAWINGS

[0013] FIGS. 1-18: Each figure presents one of gene trap vectors VICTR21, VICTR22, VICTR23, VICTR24, VICTR25, VICTR30, VICTR31, VICTR32, VICTR37, VICTR40, VICTR41, VICTR44, VICTR48, VICTR48 MTII, VICTR49, VICTR54, VICTR628, and VICTR743. The total length of each vector is provided in nucleotides. Abbreviations followed by an arabic number represent restriction enzymes and the number constitutes the number of the nucleotide in the vector at which the enzymes are capable of cutting the vector. Enzymes with an asterix at the number can cut the vector only at a single site. Non-cutters are enzymes that cannot cut the vector at any site. Sequence elements of the vector are abbreviated as follows. Where a sequence element is written upside down, it means the orientation of the element is reversed. LTR is a modified (deleted enhancer) long terminal repeat from Moloney murine leukemia virus; SA is a splice acceptor; SA-TM is a splice acceptor-transmembrane domain for trapping secreted proteins more effectively (allowing the fusion protein resulting from genomic and vector sequences to be retained intracellularly); frt is FRT recombinase; IRES is an internal ribosome entry site from EMCV (encephalomyocarditis virus); BGEO (or βGEO) is a fusion of betagalactosidase and neomycin (neo) resistance gene; pA is a SV40 gene polyadenylation signal sequence; PGK is a phosphoglycerate kinase promoter from mouse phosphoglycerate kinase-1 gene; BTK is a mouse Bruton agammaglobulinemia tyrosine kinase gene, first non-coding exon; PURO is a puromycin resistance gene coding sequence that lacks a polyadenylation sequence; SD is a splice donor sequence from mouse BTK first exon; NEO is a neomycin resistance gene; Gastrin is the first exon of the gastrin gene; SV40tpA is a concatenated triple polyadenylation signal from the major viral coat protein 1 gene of the SV40 virus; BGlobinTerm is a transcriptional terminator that operates in opposite direction of viral transcription; CRE is cre recombinase; MTII pA is a 530 base pair segment that includes the last two exons, with intervening intron, of the mouse metallothionein 2 gene and its polyadenylation signal.

### 6.0 DETAILED DESCRIPTION OF THE INVENTION

[0014] The present invention describes libraries of mice carrying engineered mutations affecting multiple genes and facilitating efficient drug development for therapy. The present invention provides mouse libraries, individual lines of mice comprising the described mouse libraries, ES cells to generate mice and other cell types specific for the mice of the libraries. The invention also comprises other compositions and methods related to the mouse libraries and ES cells described herein.

### 6.1 Mouse Libraries of the Current Invention

[0015] A mouse library of the invention preferably comprises a collection of mice and, more preferably, mice of said collection have an engineered genomic mutation. A collection of mice comprising a mouse library of the invention, in certain embodiments, comprises at least 50 mice, or at least 100 mice, at least 200 mice, at least 300 mice, at least 400 mice, at least 500 mice, at least 750 mice, at least 1000 mice, at least 2500 mice, at least 5000 mice, at least 7500 mice, at least 10000 mice, at least 25000 mice, at least 50000 mice, or at least 100000 mice. The mice in a collection of mice of the invention, in certain preferred embodiments, comprise an engineered genomic mutation. A collection of mice of the present invention, in certain embodiments, comprises at least 50 different engineered genomic mutations, or at least 100, at least 200, at least 300, at least 400, at least 500, at least 750, at least 1000, at least 2500, at least 5000, at least 7500, at least 10000, at least 25000, at least 50000, or at least 100000 engineered genomic mutations.

[0016] A mouse of a mouse library of the invention, in certain embodiments, may be of any strain, or of a mixture of strains, or a chimera, or a derivative of one or more strains. Examples of mouse strains are 129, Black 6, C57BL/6, CD-1. See, for example, U.S. Pat. Nos. 6,878,542; 6,815,185 for mouse strains, all of which are incorporated herein by reference for all purposes. A listing of various mouse strains is provided in “Genetic Variants and Strains of the Laboratory Mouse” 3rd Ed., Vols. 1 and 2, 1996, Lyon et al., eds., Oxford University Press, NY, N.Y., herein incorporated by reference in its entirety. The mouse may be a female or male mouse, a young mouse, an adult mouse, a mouse with a known phenotype or an unknown phenotype, a mouse with a known genotype or an unknown genotype.

[0017] An engineered mutation in a mouse of a library of the current invention affects the genome in the nucleus of the cells of the mice. An engineered mutation, in certain embodiments, comprises any one, two, three, four, five or more of an insertion, a deletion, a replacement, an inversion, a truncation, a point mutation, a translocation, a duplication, an amplification, a recombination, and/or any other kind of alteration of the genome. A mutation may, in certain embodiments, affect, change, disturb or alter the structure of the genome of a mouse, or the function of the genome, or both. A mutation may affect, change, disturb or alter the genome of a mouse, a chromosome, a gene, a promoter, an enhancer, a telomere, an intron, an exon, a splice site, an untranscribed region, an untranslated region, a transcribed region, a translated region, a transcription initiation site, a translation initiation site, a termination codon, a polyadenylation signal, a centromer, or any other structure or element found in the genome. A mutation may comprise, in certain embodiments, an engineered or recombinant polynucleotide of at least 500 base pairs, at least 1000 base pairs, at least 2000 base pairs, at least 5000 base pairs, at least 10000 base pairs, or at least 20000 base pairs.

[0018] An engineered genomic mutation of the current invention, in certain embodiments, comprises a mutation that is caused through human influence or intervention. For example, any human effort that increases the probability of a mutation is contemplated. In certain preferred embodiments, an engineered genomic mutation results from an assay or technique known in the field of biotechnology, molecular biology or genetic engineering, or any other discipline engaged in the manipulation of a mammalian genome. Where a mutation is engineered into the genome of a cell or an animal, off-spring of said cell or animal are also contemplated as carrying said engineered genomic mutation.

[0019] A mouse library of the current invention may be maintained, kept or stored, in certain embodiments, as a collection of living animals, a collection of ES cells, a collection of eggs, a collection of fertilized eggs, a collection of gametes, a collection of morulae, a collection of blastocysts, a collection of embryos, a collection of oocytes, a collection of fetuses, or a collection of cells of any cell type or cell aggregate that is capable of generating a mouse. Such a collection would comprise, in certain embodiments, each engineered genomic mutation so that a mouse of each mouse line of the mouse library may be generated. A mouse library of the current invention may be stored, in certain embodiments, through cryopreservation. In certain embodiments, cryopreservation is not used to store a living animal. Methods for cryopreservation useful to store a mouse library of the current invention are known in the art and are described, for example, in U.S. Pat. Nos. 5,962,213; 6,361,934; 6,500,608; 6,503,698; 6,519,954; and in Van den Abbeel et al., 1994, Cryobiology 31(5):423-33; Dumoulin et al, 1994, Fertil Steril. 62(4):793-8; Vasuthevan et al., 1992, J. Assist. Reprod. Genet. 9(6):545-50; Thornton et al., 1999, Mamm. Genome 10(10):987-92; Songsasen and Leibo, 1997, Cryobiology 35(3):255-69; Songsasen and Leibo, 1997, Cryobiology 35(3):240-54; Songsasen et al., 1997, Biol. Reprod. 56(1):143-52; Critser and Mobraaten, 2000, ILAR J. 41(4):197-206; Kasai and Mukaida, 2004, Reprod. Biomed. Online 9(2):164-170; Menezo, 2004, Obstet. Gynecol. Reprod. Biol. 115 Suppl 1:S12-5; Sztein et al, 2001, Cryobiology 42(1):28-39; Sztein et al., 1999, Lab.-Anim.-Sci. 49(1):99-100; Sztein et al., 1998, Biol.-Reprod. 58(4):1071-4, all of which are incorporated herein by reference for all purposes.

[0020] Mutations and ways of engineering mutations into a mouse genome are also described in U.S. Patent Application Nos. 20020182724, 20040072243, 20040259253, 20050059060, 20050053953; and in U.S. Pat. Nos. 6,080,576; 6,136,566; 6,207,371; 6,218,123; 6,436,707; 6,776,988; 6,808,921; 6,855,545, all of which are incorporated herein by reference for all purposes.

### 6.1.1 Generating Mouse Libraries of the Current Invention

[0021] A mouse library of the current invention, in certain embodiments, is generated by engineering a genomic mutation into a plurality of mice. A genomic mutation is engineered into a mouse, in certain embodiments, by engineering said mutation into a cell, and preferably into a cell that is useful to generate a mouse. In certain embodiments, a mutation is engineered into a gamete, a fertilized egg, a stem cell, an embryonic stem cell, a hematopoietic stem cell, or any other type of cell useful for generating a mouse. Examples of cell lines useful for generating a mouse include AB 2.2, HES-1, J1, CGR-8, R1, E14.1, E14TG2a. See, for example, U.S. Pat. Nos. 6,875,607; 6,867,035; 6,878,542; 6,815,185; 6,884,622 for cell lines, all of which are incorporated herein by reference for all purposes.

[0022] A genomic mutation, in certain embodiments, is engineered by introducing an oligonucleotide or a polynucleotide into a cell that is useful to generate a mouse. A useful nucleotide, oligonucleotide, or polynucleotide may be naturally occurring or not naturally occurring. In certain preferred embodiments, DNA, RNA, or any kind of derivative of either one, is introduced into a cell useful to generate a mouse. A DNA or RNA, or derivative of either, useful for introduction into a cell, in certain embodiments, is a vector, a virus, a construct, a replacement vector, an integration vector, a linear molecule, a circular molecule. A polynucleotide useful for engineering a genomic mutation into a cell, in certain embodiments, comprises one, two, three, or more of a marker, a marker facilitating the survival of a cell, a marker facilitating the killing of a cell, a stretch of genomic sequence, a splice donor site, a splice acceptor site, a multi-cloning site, a poly-adenylation signal, a transcription initiation site, a translation initiation site, an intron, an exon, vector sequences or any other element desired for engineering a desired genomic mutation. A stretch of genomic sequence may, in certain embodiments, have a length of 0 to 1 million bases, or 0.5 to 2 million bases, 0.2 to 20.0 kilobases, 0.2 to 5.0 kilobases, or 1.0 to 10.0 kilobases. Examples of vectors are Bluescript, pUC, or any other vector that facilitates the cloning, manipulation, sequencing, identification, isolation, amplification, and/or purification of a polynucleotide. See, for example, U.S. Pat. Nos. 6,815,185; 6,884,622 for background on designing, manipulating and cloning polynucleotides, all of which are incorporated herein by reference for all purposes.

[0023] In certain embodiments, a genomic mutation of the current invention is engineered by introducing a vector as shown in one or more of FIGS. 1 through 18 into a mouse cell, for example, an embryonic stem cell. A vector as shown in each of FIGS. 1 through 18 is referred to as a gene trap vector. In certain preferred embodiments, a gene trap vector may integrate into a gene in the genome of a cell. In certain other preferred embodiments, the integration of a gene trap vector into a gene results in a transcript from that gene comprising vector sequences and gene sequences (hybrid transcript). In certain other preferred embodiments, a hybrid transcript results from a gene with an integrated gene trap vector after transcription of the gene and before and following splicing of the transcript. Elements of gene trap vectors useful for making a mouse or cell of the current invention are known to those of skill in the art, for example, a mouse PGK promoter is discussed in Adra et al., 1987, Gene 60(1):65-74; a mouse BTK sequence is discussed in Sideras et al., 1994, J. Immunol. 153(12):5607-17; an SABgeo sequence and a splice acceptor sequence from adenovirus are discussed in Friedrich and Soriano, 1991, Genes Dev. 5(9):1513-23; a pGen (MoMuLV backbone) sequence is discussed in Soriano et al., 1991, J. Virol. 65(5):2314-9; a bGH polyadenylation sequence and a SV40 polyadenylation sequence are discussed in Pfarr et al., 1986, DNA 5(2):115-22, a polyadenylation signal from the major viral coat protein 1 gene of the SV40 virus is discussed in Maxwell et al, 1989, Biotechniques. 7(3):276-80, all of which are incorporated by reference.

[0024] In certain other preferred embodiments, a mutation is engineered into a cell that is maintained in culture or any environment that allows the manipulation of large numbers of cells and that allows the screening and identification of cells with desired characteristics, for example, cells that comprise an engineered genomic mutation of interest. In certain other embodiments, cells are maintained, grown, manipulated, screened and/or identified using one, two, three, four, or more different cultures, media, environments, buffers, sera, salts, and supports. See, for example, U.S. Pat. Nos. 6,875,607; 6,878,542; 6,815,185 for background on tissue culture, all of which are incorporated herein by reference for all purposes.

[0025] In certain other embodiments, a genomic mutation is engineered into a mouse by introducing said mutation into the cells of a mouse. For example, an oligonucleotide or a polynucleotide may be introduced into the cells of a mouse by any means capable of such delivery, for example, a virus, a liposome or any other means known in the art.

[0026] Background on generating a mouse library, including cloning, tissue culture, mutagenesis and generating mice, is also described in U.S. Patent Application Nos. 20020182724, 20040072243, 20040259253, 20050059060, 20050053953; and in U.S. Pat. Nos. 6,080,576; 6,136,566; 6,207,371; 6,218,123; 6,436,707; 6,776,988; 6,808,921; 6,855,545, all of which are incorporated herein by reference for all purposes.

### 6.1.2 Characterizing Mice of the Libraries of the Current Invention

[0027] Mice of a library of the current invention, in certain embodiments, are characterized by analyzing mouse lines comprising said library. A mouse line, in certain embodiments, consists of mice that are related as off-spring. In certain other embodiments, a mouse line consists of mice that comprise the same engineered genomic mutation. A mouse line, in certain embodiments, comprises mice that are homozygous or heterozygous for the same engineered genomic mutation, mice that are chimeras comprising cells that comprise that same engineered genomic mutation, and mice that are off-spring (or progeny) of such homozygotes, heterozygotes or chimeras, including wild-type off-spring that does not carry the same engineered genomic mutation. A mouse of each of these aforementioned types that is part of a mouse line of the invention is referred to herein as Homozygote, Heterozygote, Chimera, Off-Spring or Wild-Type. In certain embodiments, at least 50 percent of all mouse lines comprising a library of the invention are characterized, in certain other preferred embodiments, at least 75 percent or all mouse lines of such a library are characterized.

[0028] A mouse line of the present invention, in certain embodiments, is characterized by analyzing a Homozygote, a Heterozygote, a Chimera, an Off-Spring, and a Wild-Type of said mouse line, or any one, two, three or four thereof. In certain embodiments, at least one Homozygote, one Heterozygote and one Wild-Type mouse is analyzed, or at least two of each of the three types, at least three, at least four, at least five, at least eight, at least ten, or at least twenty. A mouse is characterized, in certain embodiments, by analyzing any aspect of the mouse or relating to the mouse. In certain embodiments, a mouse is characterized by analyzing all or a part of its structure, function, anatomy, physiology, genetics, genome, gene expression, cell growth, tumorigenesis, development, embryology, behavior, movement, susceptibility to disease, life span, weight, skeleton, or any other aspect of the mouse. A Homozygote or Heterozygote mouse of the current invention is characterized by at least identifying a gene affected by an engineered genomic mutation of said mouse.

### 6.1.2.1 Genetic Analysis

[0029] A mouse of the invention, in certain embodiments, is analyzed genetically. A preferred genetic analysis comprises determining or identifying any change or changes in the genome of a mouse comprising an engineered genomic mutation when compared to a mouse that does not comprise such a mutation. A genetic analysis, according to certain embodiments, comprises identifying a part of the genome affected by the engineered mutation, isolating a part of the genome comprising the engineered mutation, cloning a part of the genome comprising the engineered mutation, sequencing DNA, sequencing RNA, performing a restriction analysis, determining the site where an exogenous polynucleotide integrated into the genome, determining the presence of a rearrangement of parts of the genome, determining if a part of the genome has been deleted, determining if a part of the genome has been multiplied, determining if a part of the genome has been modified, or determining if any other kind of change has occurred to the genome of a mouse of the invention. See, for example, U.S. Pat. Nos. 6,875,607; 6,867,035; 6,878,542; 6,815,185; 6,884,622 for background on cloning.

[0030] Background on genetic analysis is also described in U.S. Patent Application Nos. 20020182724, 20040072243, 20040259253, 20050059060, 20050053953; and in U.S. Pat. Nos. 6,080,576; 6,136,566; 6,207,371; 6,218,123; 6,436,707; 6,776,988; 6,808,921; 6,855,545, all of which are incorporated herein by reference for all purposes.

### 6.1.2.2 Transcriptional Analysis

[0031] A mouse of the invention, in certain embodiments, is analyzed by performing a transcriptional analysis. A transcriptional analysis, according to certain embodiments, comprises determining the activity of any part of the genome of a mouse, for example, the activity of one or more genes. A transcriptional analysis, according to certain embodiments, comprises determining the quantity, stability, structure, location, sequence, modification, binding, or folding of RNA, for example, mRNA, hnRNA, tRNA, rRNA, or any other kind of RNA.

[0032] A transcriptional analysis comprises, in certain preferred embodiments, identifying an RNA molecule found in a mouse carrying the engineered genomic mutation but not in a mouse of the same strain not carrying that mutation (“mutated RNA”). In certain embodiments, a mutated RNA results from transcription of a part of the genome altered by the engineered genomic mutation, for example, if the engineered mutation resulted in the insertion of an exogenous sequence into an exon of a gene, transcription of that gene would result in an RNA molecule that includes the exogenous sequence. Or, for example, where the engineered mutation inserts exogenous exon sequences and one or more splice sites into a gene (for example, an exogenous exon with a splice acceptor site upstream and a splice donor site downstream may integrate into an intron) transcription of that gene would result in an RNA molecule that includes the exogenous exon sequences and the splice sites (“mutated hnRNA”). A mutated hnRNA, in certain embodiments, would undergo splicing to yield mature RNA molecules found in a mouse with an engineered genomic mutation (“mutated mRNA”) but not in a Wild-Type mouse (for example, the mutated mRNA would include an exogenous exon sequence that is not found in mRNA resulting from the non-mutated gene).

[0033] Background on transcriptional analysis is also described in U.S. Patent Application Nos. 20020182724, 20040072243, 20040259253, 20050059060, 20050053953; and in U.S. Pat. Nos. 6,080,576; 6,136,566; 6,207,371; 6,218,123; 6,436,707; 6,776,988; 6,808,921; 6,855,545, all of which are incorporated herein by reference for all purposes.

### 6.1.2.3 Phenotypic Analysis

[0034] A mouse of the invention, in certain embodiments, is analyzed by performing a phenotypic analysis. A phenotypic analysis, according to certain embodiments, comprises an assessment or evaluation of the behavior, coat color, size, proportions, shape, skeleton, reflexes, blood, blood protein, blood composition, cholesterol level, life span, weight, organ size, organ shape, organ function, brain size, or any other phenotypic aspect.

### 6.1.2.4 Computational Analysis

[0035] A mouse of the invention, in certain embodiments, is analyzed by performing a computational analysis. A computational analysis, according to certain embodiments, comprises a comparison of data derived from a mouse, a mouse line or a mouse library of the current invention with data known in the art. In certain other embodiments, a computational analysis comprises a comparison of data derived from a mouse or a mouse line of the current invention with data obtained from another mouse or mouse line of the current invention.

[0036] A computational analysis, in certain embodiments, comprises a comparison of genomic data, sequence data, expression data, phenotypic data, behavioral data, and any other kind of data.

### 6.2 Mice of the Current Invention

[0037] The current invention provides, in certain embodiments, a mouse carrying an engineered genomic mutation and, in certain other embodiments, the current invention provides a mouse line of the mice of the current invention. A mouse of the current invention, in certain embodiments, may be a Homozygote, a Heterozygote, a Chimera, an Off-Spring or a Wild-Type.

[0038] A mouse of the current invention may be maintained, kept or stored, in certain embodiments, as a living animal, an ES cell, an egg, a fertilized egg, a gamete, a morula, a blastocyst, an embryo, an oocyte, a fetus, or a cell of any cell type or cell aggregate that is capable of generating a mouse. A mouse of the current invention may be stored, in certain embodiments, through cryopreservation. In certain embodiments, cryopreservation is not used to store a living animal. Methods for cryopreservation useful to store a mouse of the current invention are known in the art and are described, for example, in U.S. Pat. Nos. 5,962,213; 6,361,934; 6,500,608; 6,503,698; 6,519,954; and in Van den Abbeel et al, 1994, Cryobiology 31(5):423-33; Dumoulin etaL, 1994, Fertil Steril. 62(4):793-8; Vasuthevan et al., 1992, J. Assist. Reprod. Genet. 9(6):545-50; Thornton et al., 1999, Mamm. Genome 10(10):987-92; Songsasen and Leibo, 1997, Cryobiology 35(3):255-69; Songsasen and Leibo, 1997, Cryobiology 35(3):240-54; Songsasen et al., 1997, Biol. Reprod. 56(1):143-52; Critser and Mobraaten, 2000, ILAR J. 41(4):197-206; Kasai and Mukaida, 2004, Reprod. Biomed. Online 9(2):164-170; Menezo, 2004, Obstet. Gynecol. Reprod. Biol. 115 Suppl 1:S12-5; Sztein et al., 2001, Cryobiology 42(1):28-39; Sztein et al., 1999, Lab.-Anim.-Sci. 49(1):99-100; Sztein et al., 1998, Biol.-Reprod. 58(4): 1071-4, all of which are incorporated herein by reference for all purposes.

[0039] Table 1 shows examples of mice carrying engineered genomic mutations of the current invention. Table 1 also includes a description of the phenotype of a mouse carrying each of the engineered genomic mutations in Table 1.

[0040] Background on mice is also described in U.S. Patent Application Nos. 20020182724, 20040072243, 20040259253, 20050059060, 20050053953; and in U.S. Pat. Nos. 6,080,576; 6,136,566; 6,207,371; 6,218,123; 6,436,707; 6,776,988; 6,808,921; 6,855,545, all of which are incorporated herein by reference for all purposes.

### 6.3 Cells of the Current Invention

[0041] The current invention further includes, in certain embodiments, cells carrying an engineered genomic mutation. A cell of the current invention includes, in certain embodiments, a stem cell, an embryonic stem cell, a hematopoietic stem cell, a progenitor cell, a fibroblast, a nerve cell, a muscle cell, an epithelial cell, a teratocarcinoma cell, any other cell type known in the art, a cell that is progeny of one of the mentioned cell types, a cell that is derived from one of the mentioned cell types through differentiation.

[0042] A cell of the current invention may be obtained, in certain embodiments, by engineering a mutation into the genome of such a cell, for example, a stem cell or an embryonic stem cell. A cell of the current invention may also be obtained, in certain embodiments, from a mouse of the current invention, for example, from a Homozygote, a Heterozygote, an Off-Spring, a Chimera, or a Wild-Type. In certain other embodiments, a cell of the current invention is progeny of a cell obtained from a mouse of the current invention, for example, from a Homozygote, a Heterozygote, an Off-Spring, a Chimera, or a Wild-Type.

[0043] Background on cells is also described in U.S. Patent Application Nos. 20020182724, 20040072243, 20040259253, 20050059060, 20050053953; and in U.S. Pat. Nos. 6,080,576; 6,136,566; 6,207,371; 6,218,123; 6,436,707; 6,776,988; 6,808,921; 6,855,545, all of which are incorporated herein by reference for all purposes.

### 6.4 Polynucleotides of the Current Invention

[0044] The current invention provides, in certain embodiments, a polynucleotide. In certain embodiments, a polynucleotide of the current invention is derived from a cell or a mouse of the current invention. In certain other embodiments, a polynucleotide of the current invention comprises one, more than one, or all exons and/or one, more than one, or all introns of a gene that is found in a Wild-Type of a mouse line of the current invention and that carries an engineered genomic mutation in a Homozygote of the same mouse line, or its complementary, or a fragment thereof, or a polynucleotide capable of hybridizing thereto under conditions of moderate stringency or high stringency. A polynucleotide of the current invention, in certain embodiments, encodes a polypeptide of the current invention. A polynucleotide of the current invention may be DNA, RNA or any modification or derivative thereof. A polynucleotide may be genomic DNA, cDNA, hnRNA, mRNA, or any combination thereof. A polynucleotide of the current invention is at least 50 base pairs in length, or at least 100 base pairs, or at least 200 base pairs, or at least 300 base pairs, or at least 400 base pairs, or at least 500 base pairs, or at least 1000 base pairs, or at least 2000 base pairs, or at least 5000 base pairs, or at least 10000 base pairs, or at least 20000 base pairs in length.

[0045] The identification, isolation, cloning, modification and other processing of polynucleotides and conditions for hybridization under various conditions, including moderate and high stringency, are described in United States Patent Application Number 20050059060, which is incorporated herein for that and any other purpose.

### 6.5 Polypeptides of the Current Invention

[0046] The current invention provides, in certain embodiments, a polypeptide. In certain embodiments, a polypeptide of the current invention is derived from a cell or a mouse of the current invention. In certain other embodiments, a polypeptide of the current invention comprises a polypeptide that is encoded by one, more than one, or all exons of a gene that is found in a Wild-Type of a mouse line of the current invention and that carries an engineered genomic mutation in a Homozygote of the same mouse line, or a fragment thereof. In certain other embodiments, a polypeptide of the current invention is encoded by a polynucleotide of the current invention. A polypeptide of the current invention may comprise any one or more or all of the naturally occurring amino acids, or any modification or derivative thereof. A polypeptide of the current invention is at least 10 amino acids in length, or at least 25 amino acids, or at least 50 amino acids, or at least 100 amino acids, or at least 200 amino acids, or at least 300 amino acids, or at least 500 amino acids in length.

[0047] The identification, isolation, modification and other processing of polypeptides are described in United States Patent Application Number 20050059060, which is incorporated herein for that and any other purpose.

### 6.6 Antibodies of the Current Invention

[0048] The current invention also provides antibodies. In certain embodiments, an antibody of the present invention is specific to an antigen or epitope which is absent in a mouse of the invention (Absent Antigen). In certain preferred embodiments, an Absent Antigen is absent in a Homozygote of a mouse line of the invention, but not absent in a Wild-Type of the same mouse line. In certain other embodiments, an Absent Antigen is synthesized in a cell of a Wild-Type of a mouse line of the invention, but not in a Homozygote of the same mouse line. In certain embodiments, an Absent Antigen is expressed by a gene in a Wild-Type of a mouse line of the invention but not a Homozygote of the same mouse line. In certain other embodiments, an Absent Antigen is encoded by a gene in a Wild-Type of a mouse line of the invention but not a Homozygote of the same mouse line.

[0049] In certain other embodiments, an antibody of the invention is raised in a mouse of the invention, for example, a Wild-Type, a Chimera, an Off-Spring, a Heterozygote, and preferably a Homozygote. In certain other embodiments, an antibody of the current invention may be changed or altered into another antibody type. For example, a mouse antibody may be altered into a humanized antibody with the same antigen specificity, or any other type of alteration may be carried out. Antibody types contemplated under the current invention include, but are not limited to, polyclonal, monoclonal, multispecific, human, humanized or chimeric antibodies, single chain antibodies, Fab fragments, F(ab′) fragments, fragments produced by a Fab expression library, anti-idiotypic (anti-Id) antibodies (including, e.g., anti-Id antibodies to antibodies of the invention), and epitope-binding fragments of any of the above. In certain embodiments, an antibody of the current invention binds an Absent Antigen with a binding affinity (Kₐ) of 10⁶ M⁻¹ or greater, preferably 10⁷ M⁻¹ or greater, more preferably 10⁸ M⁻¹ or greater, more preferably 10⁹ M⁻¹ or greater, more preferably 1010 M⁻¹ or greater, more preferably 10¹¹ M⁻¹ or greater, and most preferably 10¹² M⁻¹ or greater.

[0050] Background on antibodies, antibody generation, characterization, modification, and uses are also described in U.S. Patent Application Nos. 20020182724, 20040072243, 20040259253, 20050059060, 20050053953; and in U.S. Pat. Nos. 6,080,576; 6,136,566; 6,207,371; 6,218,123; 6,436,707; 6,776,988; 6,808,921; 6,855,545; 6,824,780; 6,827,934; 6,824,993; 6,767,541; 6,828,425, all of which are incorporated herein by reference for all purposes.

### 6.7 Therapeutic Utility

[0051] The present invention provides, in certain embodiments, efficient drug development or development of therapies, or both. A mouse or a cell of the present invention may be used to obtain drugs and therapies for treatment of disease. An antibody of the present invention, in certain embodiments, may be used for therapeutic applications. Therapeutic applications, for example of antibodies of the invention, include disease phenotypes and phenotypic traits as those shown in Table 1.

### 6.8 Diagnostic Utility

[0052] The present invention provides, in certain embodiments, diagnostic tools. For example, a mouse or a cell of the present invention may be used, in certain embodiments, to diagnose the effectiveness of drugs, antibodies, or small molecules. An antibody of the present invention may be used, for example, to diagnose the presence or quantity of an antigen or epitope that the antibody is specific for, or a disease condition associated with a phenotype found in the animal in which the antibody is raised.

[0053] The present invention is further illustrated by the following examples, which are not intended to be limiting in any way whatsoever.

### EXAMPLES

### Example 1

### Generation of a Library of Mutated Mouse ES Cells Defined By GTS Sequences

[0054] Retroviral vectors such as those exemplified and described in detail in U.S. Pat. Nos. 6,080,576, 6,136,566, 6,139,833 were used to generate a collection of gene trapped ES cell clones. Plasmids containing various VICTR cassettes described above were constructed by conventional cloning techniques. Usually, the cassettes contained a PGK promoter directing transcription of an exon that ends in a canonical splice donor sequence. The transcript encoding the exon was engineered to contain sequences that allow for the annealing of two nested PCR and sequencing primers. The vector backbone was based on pBluescript KS+from Stratagene Corporation.

[0055] The plasmid construct was linearized by digestion with, for example, ScaI, which cuts at a unique site in the plasmid backbone. The plasmid was then transfected into the mouse ES cell line AB2.2 by electroporation using a BioRad Genepulser apparatus. After the cells were allowed to recover, gene trap clones were selected by adding puromycin to the medium at a final concentration of 3 μg/ml (other antibiotics, such as G418, were used at suitable concentrations as applicable). Positive clones were allowed to grow under selection for approximately 10 days before being removed and cultured separately for storage and to determine the sequence of the disrupted gene.

[0056] Total RNA was isolated from an aliquot of cells from each of 18 gene trap clones chosen for study. Five micrograms of this RNA was used in a first strand cDNA synthesis reaction using the “RS” primer. This primer has unique sequences (for subsequent PCR) on its 5′ end and nine random nucleotides or nine T (thymidine) residues on it's 3′ end. Reaction products from the first strand synthesis were added directly to a PCR with outer primers specific for the engineered sequences of puromycin and the “RS” primer. After amplification, aliquots of reaction products were subjected to a second round of amplification using primers internal, or nested, relative to the first set of PCR primers. This second amplification provided more reaction product for sequencing and also provided increased specificity for the specifically gene trapped DNA.

[0057] The products of the nested PCR were visualized by agarose gel electrophoresis, and seventeen of the eighteen clones provided at least one band that was visible on the gel with ethidium bromide staining. Most gave only a single band, which is an advantage in that a single band is generally easier to sequence. The PCR products were sequenced directly after excess PCR primers and nucleotides were removed by filtration in a spin column (Centricon-100, Amicon). DNA was added directly to dye terminator sequencing reactions (purchased from ABI) using the standard M13 forward primer, a region for which was built into the end of the puro exon in all of the PCR fragments.

[0058] Subsequent studies have used both VICTR 3, VICTR 20 and follow-on vectors. Like VICTR 3, VICTR 20 is exemplary of a broader family of vectors that incorporate two main functional units: a sequence acquisition component having a strong promoter element (phosphoglycerate kinase 1) active in ES cells that is fused to the puromycin resistance gene coding sequence that lacks a polyadenylation sequence but is followed by a synthetic consensus splice donor sequence (PGKpuroSD); and 2) a mutagenic component that incorporates a splice acceptor sequence fused to a selectable, calorimetric marker gene and followed by a polyadenylation sequence (for example, SAβgeopA or SAIRESβgeopA). Also like VICTR 3, stop codons have been engineered into all three reading frames in the region between the 3′ end of the selectable marker and the splice donor site.

[0059] When VICTRs 3, 20, and various variations and modifications thereof were used in the commercial scale application of the presently disclosed invention; many mutagenized ES cell clones were rapidly engineered and obtained. Sequence analysis obtained from these clones has identified a wide variety of both previously identified and novel sequences.

[0060] The cloned 3′ RACE products resulting after the target ES cells were infected with VICTR 20 were purified using conventional column chromatography (e.g., S300 and G-50 columns), and the products were recovered by centrifugation. Purified PCR products were quantified by fluorescence using PicoGreen (Molecular Probes, Inc., Eugene Oreg.) as per the manufacturer's instructions.

[0061] Dye terminator cycle sequencing reactions with AmpliTaq® FS DNA polymerase (Perkin Elmer Applied Biosystems, Foster City, Calif.) were carried out using approximately 7 pmoles of sequencing primer, and approximately 30-120 ng of 3′ template. Unincorporated dye terminators were removed from the completed sequencing reactions using G-50 columns as described above. The reactions were dried under vacuum, resuspended in loading buffer, and electrophoresed through a 6% Long Ranger acrylamide gel (FMC BioProducts, Rockland, Me.) on an ABI Prism® 377 with XL upgrade as per the manufacturer's instructions. The sequences of the resulting amplicons, or GTSs, were recorded.

### Example 2

### Transfecting ES Cells

[0062] a. Vector Construction

[0063] The promoter from the mouse phosphoglycerate kinase (PGK) gene was placed upstream from the first exon of the naturally occurring murine btk gene (nucleotides 40,043 to 40,250 of the murine btk gene). The first exon of the btk gene does not contain a translational start site and initiation codon marking the 5′ region of the coding sequence; however, these features could be engineered into the exon if desired. The 3′ end of the coding region of the first exon is marked by a splice donor sequence. Given that splice donor recognition sequences can extend into intronic sequence, 103 bases of intron DNA was retained after the end of the btk first exon. The PGKbtkSD cassette lacks a 3′ polyadenylation signal. Accordingly, any transcript produced by the cassette cannot be properly processed, and therefore identified by 3′ RACE, unless the transcript is spliced to a 3′ exon that can be polyadenylated.

[0064] The above 3′ gene trap cassette was placed into a retroviral vector (in reverse orientation relative to the flanking LTR regions) that incorporated a polyadenylation site 5′ to the PGK promoter of the 3′ gene trap cassette, the neo gene was placed 5′ to the polyadenylation site, and a splice acceptor (SA) site was placed 5′ to the neo coding region to produce a functional SAneopA, or optionally a SAIRESneopA 5′ gene trap cassette. This vector also incorporates, in operable combination, a pair of recombinase recognition sites that flank the PGKbtkSD cassette. This vector typically requires that the target cell naturally express the trapped gene; however, this requirement can be overcome by adding a promoter that independently controls the expression of the selectable marker.

[0065] b. 3′ Gene Trapping

[0066] The btk vector was introduced into the embryonic stem cells using standard techniques. In brief, supernatant from GP+E packaging cells was added to approximately 2×10⁶ embryonic stem cells (at an input ratio of approximately 0.1 virus/target cell) for 16 hours and the cells were subsequently selected with G418 for 10 days. G418 resistant cells were subsequently isolated, grown up on 96-well plates and subjected to automated RNA isolation, reverse transcription, PCR and sequencing protocols to obtain the gene trapped sequences.

[0067] RNA Isolation was carried out on DNA bind plates (Corning/Costar) treated with 5′-amino (dT)₄₂ (GenoSys Biotechnologies) in a 50 mM Sodium Phosphate buffer, pH 8.6, and allowed to sit at room temperature overnight. Immediately prior to use the plates were rinsed three times with PBS and twice with TE. Cells were rinsed with PBS, lysed with a solution containing 100 mM Tris-HCl, 500 mM LiCl, 10 mM EDTA, 1% LiDS, and 5 mM DTT in DEPC water, and transferred to the DNA binding plate where the mRNA was captured. After a 15 minute incubation the RNA was washed twice with a solution containing 10 mM Tris-HCl, 150 mM LiCl, 1 mM EDTA, and 0.1% LiDS in DEPC water. The RNA was then rinsed three times with the same solution minus LiDS. Elution buffer containing 2 mM EDTA in DEPC water was added and the plate was heated at 70° C. for five minutes. An RT premix containing 2× First Strand buffer, 100 mM Tris-HCl, pH 8.3, 150 mM KCl, 6 mM MgCl₂, 2 mM dNTPs, RNAGuard (1.5 units/reaction, Pharmacia), 20 mM DTT, QT primer (3 pmol/rxn, GenoSys Biotechnologies, sequence: 5′ CCAGTGAGCAGAGTGACGAGGACTCGAGCTCAAGCTTTTTTTTTTTTTTTTT 3′, SEQ ID NO: 1) and Superscript II enzyme (200 units/r×n, Life Technologies) was added. The plate was transferred to a thermal cycler for the RT reaction (37° C. for 5 min. 42° C. for 30 min. and 55° C. for 10 min).

### Example 3

### Genetic Analysis of ES Cell Colonies

[0068] The cDNA was amplified using two rounds of PCR. The PCR premix contains: 1.1×MGBII buffer (74 mM Tris pH 8.8, 18.3 mM Ammonium Sulfate, 7.4 mM MgCl₂, 5.5 mM 2ME, 0.011% Gelatin), 11.1% DMSO (Sigma), 1.67 mM dNTPS, Taq (5 units/r×n), water and primers. The sequences of the first round primers are: Pₒ 5′AAGCCCGGTGCCTGACTAGCTAG3′, SEQ ID NO: 2; BTK, 5′GAATATGTCTCCAGGTCCAGAG3′, SEQ ID NO: 3; and Qₒ 5′ CCAGTGAGCAGAGTGACGAGGAC3′, SEQ ID NO: 4 (pmol/r×n). The sequences of the second round primers are Pᵢ 5′CTAGCTAGGGAGCTCGTC3′, SEQ ID NO: 5; BTKᵢ 5′ CCAGAGTCTTCAGAGATCAAGTC3′, SEQ ID NO: 6; and Qᵢ 5′ GAGGACTCGAGCTCAAGC3′, SEQ ID NO: 7 (50 μmol/r×n). The outer premix was added to an aliquot of cDNA and run for 17 cycles (95° C. for 1 min. 94° C. for 30 sec., 58° C. for 30 sec 65° C. for 3.5 min). An aliquot of this product was added to the inner premix and cycled at the same temperatures 40 times.

[0069] The nested 3′ RACE products were purified in a 96-well microtiter plate format using a two-step protocol as follows. Twenty-five microliters of each PCR product was applied to a 0.25 ml bed of Sephacryl®. S-300 (Pharmacia Biotech AB, Uppsala, Sweden) that was previously equilibrated with STE buffer (150 mM NaCl, 10 mM Tris-HCL, 1 mM EDTA, pH 8.0). The products were recovered by centrifugation at 1200×g for 5 minutes. This step removes unincorporated nucleotides, oligonucleotides, and primer-dimers. Next, the products were applied to a 0.25 ml bed of Sephadex® G-50 (DNA Grade, Pharmacia Biotech AB) that was equilibrated in MilliQ H₂O, and recovered by centrifugation as described earlier. Purified PCR products were quantified by fluorescence using PicoGreen (Molecular Probes, Inc., Eugene Oreg.) as per the manufacturer's instructions.

[0070] Dye terminator cycle sequencing reaction with AmpliTaq® FS DNA polymerase (Perkin Elmer Applied Biosystems, Foster City, Calif.) were carried out using 7 pmoles of primer (Oligonucleotide OBS; 5′CTGTAAAACGACGGCCAGTC3′, SEQ ID NO: 8) and approximately 30-120 ng of 3′ RACE product. The cycling profile was 35 cycles of 95° C. for 10 sec, 55° C. for 30 sec, and 60° C. for 2 min. Unincorporated dye terminators were removed from the completed sequencing reactions using G-50 columns as described earlier. The reactions were dried under vacuum, resuspending in loading buffer, and electrophoresed through a 6% Long Ranger acrylamide gel (FMC BioProducts, Rockland, Me.) on an ABI Prism® 377 with XL upgrade as per the manufacturer's instructions.

[0071] The automated 96-well format was used to obtain sequence, and data was obtained from 70% of the colonies. Upon examination, the sequence from the first exon of btk was identified followed by the btk splice junction. The splice junction was followed by unique sequences from each separate gene trap event. These sequences averaged 500 bp in length and were of high quality often containing long open reading frames. In addition 80% of these sequences can be matched using blast searches to sequences found in the GenBank database indicating that transcribed exonic sequences were identified. These gene trap sequence tags are of significantly better length and quality than those produced by previous gene trap designs. The new tags are improved in both length and quality and the fact that 80% of the tags match GenBank sequences suggests that they efficiently trap genes.

### Example 4

### Using ES Cells to Generate Mice

[0072] ES cells of the current invention are used to generate a mouse of the current invention. Any technique known in the art can be employed to generate a mouse with an ES cell. For example, an ES cell can be used to generate a mouse by injecting the cell into a blastocyst as described, for example, in Bradley, 1987. In: Teratocarcinomas and Embryonic Stem Cells: A Practical Approach, Robertson, ed. IRL, Oxford, pp. 113-152. Blastocysts can be isolated from a pregnant mouse on day 3.5 of pregnancy. About 20-25 ES cells are typically injected into a blastocyst. Following injection, the blastocyst is implanted into a suitable pseudopregnant female foster animal and the embryo brought to term. Progeny of the foster animal are used to breed more animals. If an ES cell harboring the engineered genomic mutation entered the germline of the foster animal's Off-Spring, the mutation will be represented in the Off-Spring's gene pool. Animals are bred to obtain a Homozygote, Heterozygote, Chimera, Off-Spring and/or Wild-Type animal. One may determine if an ES cell carrying an engineered genomic mutation of interest has entered the germline by observing the coat color of Off-Spring mice. As the ES cells are derived from an agouti coat color strain and the blastocyst from a black coat color strain, second or higher generation Off-Spring carrying agouti coat color would be indicative that an ES cell carrying the engineered genomic mutation has entered the germline. In addition, Off-Spring animals are examined genetically to detect the presence of the genetrap vector and to characterize the engineered genomic mutation.

[0073] Additional background on generating a mouse can also be found in, for example, Puhler, A., Ed., Genetic Engineering of Animals, VCH Publ., 1993; Murphy and Carter, Eds., Transgenesis Techniques Principles and Protocols (Methods in Molecular Biology, Vol. 18), 1993; and Pinkert, C A, Ed., Transgenic Animal Technology: A Laboratory Handbook, Academic Press, 1994. Transgenic mice may also be generated, for example, as described in Thomas et al. (1999) Immunol., 163:978-84; Kanakaraj et al. (1998) J. Exp. Med., 187:2073-9; or Yeh et al. (1997) Immunity 7:715-725; Jaenisch (1988) Science, 240:1468-1474.

### Example 5

### Phenotypic Analysis of Mice

[0074] Functional annotation of the mammalian genome in the post-genome era is an important task. Genetic studies in model organisms provide an approach for understanding gene function. Technologies for parallel production and analysis of mouse mutants provides a valuable screen through mutations in druggable genes to identify targets for drug discovery. By carrying out genetic screens in a mammalian model system, one can screen directly for changes in physiology relevant to disease treatment. This example describes a biological screen for analyzing large numbers of mouse lines, for example, for screening 1000 mouse gene knockouts per year. This screen is focused on discovering the targets for therapeutic products in the areas of metabolism, endocrinology, immunology, neurology, cardiology, opthalmology, reproductive biology and oncology.

### 5.1 INTRODUCTION

[0075] Genetic screens can be used to scan a genome for genes that play a role in any process of interest. Genetic screens were carried out in invertebrate model organisms and included saturation screens of Drosophila Model Organisms in Drug Discovery. Ed. Pamela M. Carroll and Kevin Fitzgerald Copyright 2003 John Wiley & Sons, Ltd., to identify genes involved in organization of the body plan during development (Nusslein-Volhard and Wieschaus, 1980) and screens in Caenorhabditis elegans to identify genes involved in producing the invariant cell lineage pattern (Horvitz and Sulston, 1980; Chalfie et al., 1981; Hedgecock et al., 1983). These screens relied on saturation mutagenesis to interrogate the genome for the set of genes involved in these processes and led to the discovery of genes such as the homeobox genes and apoptosis regulators involved in development across all invertebrate and vertebrate species examined. Since these screens, additional genetic screens have been carried out in the fly and worm, further demonstrating the power of genetics for the dissection of pathways and processes. These screens require only a method for creating large numbers of tractable mutations in genes and a phenotype that can be measured.

[0076] Genetic screening has been adapted for the vertebrate model organisms of zebrafish and mice. In zebrafish, both chemical mutagenesis (Mullins et al., 1994; Haffter et al., 1996) and gene trapping (Golling et al., 2002) have been combined with phenotypic screens to identify mutations affecting development of the neural crest, pigmentation, jaw, branchial arches, visual system, heart and other internal organs, ear, retina, brain, midline, shape and movement (Brockerhoff et al., 1995; Abdelilah et al., 1996; Baier et al., 1996; Brand et al., 1996; Chen et al., 1996; Granato et al., 1996; Kelsh et al., 1996; Malicki et al., 1996a,b; Neuhauss et al., 1996; Odenthal et al., 1996; Piotrowski et al., 1996; Schier et al., 1996; Solnica-Krezel et al., 1996; Stemple et al., 1996). These screens take advantage of the large number of Off-Spring, oviparous development and transparent nature of the zebrafish embryo that make it a system for the study of vertebrate development that should result in the identification of genes involved in vertebrate development. For the purpose of drug discovery, effective genetic screens in mammals allow one to dissect mammalian physiology to identify key genes with therapeutic relevance as potential drug targets. Genetic screens in mammals are logistically possible with advances in mutagenesis and screening methods in mice that facilitate functional dissection of the mammalian genome. Advances in the scale and speed of gene targeting (Walke et al., 2001; Abuin et al., 2002) and the development of genome-wide gene trapping (Zambrowicz et al., 1998; Wiles et al., 2000; Leighton et al., 2001; Mitchell et al., 2001) in mouse embryonic stem cells resulted in mutations in a number of genes. The screen described in this example combines mouse screening methods with miniaturization of medical technologies and with disease challenge assays useful to the mouse model for diagnostic analysis of mice. The mouse is a model organism that is ideal for studying many aspects of mammalian physiology with direct medical relevance. Screens are used to identify genes involved in insulin sensitivity, hypertension, body fat deposition, energy expenditure, bone deposition and breakdown, angiogenesis and many other processes with significance for the treatment of disease.

[0077] These advances have brought together two aspects for genetic screens in mammals: the ability to produce large numbers of mutations and the ability to screen for phenotypes of interest. The development of mutagenesis strategies to mutate large numbers of mouse genes has been described (Zambrowicz et al., 1998; Wiles et al., 2000; Leighton et al., 2001; Mitchell et al., 2001). This example describes phenotypic screens designed to identify genes for use as targets to ameliorate diseases in the areas of diabetes/metabolism, cardiology, neurology, opthalmology, reproductive biology, oncology and immunology/inflammation.

### 5.2 SATURATING THE DRUGGABLE GENOME

[0078] One of the advantages of doing genetic screens in the mouse model system is the ability to measure directly the physiological parameters relevant to disease. These direct measures allow the identification of gene products that, when modulated by small-molecule drugs, provide a therapeutic effect. This approach is supported by the excellent correlation between the knock-out phenotypes of the targets of marketed pharmaceutical drugs and the known efficacy and side-effects of those drugs (Zambrowicz and Sands, 2003). An example is a knock-out of the H+/K+ ATPase: the target of drugs such as Prilosec™ (AstraZeneca) used to lower gastric acid secretion for the treatment of gastric ulcer disease. Knock-out of either the alpha or beta subunit of ATPase results in animals with neutral stomach pH—a phenotype that correlates with the action of the pharmacological antagonists of ATPase (Scarff et al., 1999; Spicer et al., 2000). Similarly, mammalian screens can be set up to identify the genes that play a role in any specified therapeutic area. For instance, if one is interested in genes that may be important for the treatment of diabetes, it is possible to screen mutations in mice for direct effects on blood glucose and insulin levels, insulin sensitivity and other parameters such as obesity that play an important role in the diabetic process. There are genes involved in the regulation of glucose homeostasis, for example, the insulin receptor, which when mutated in mice results in animals with severe insulin resistance and frank diabetes (Accili et al., 1996; Joshi et al., 1996). Likewise, if one is interested in genes important for the treatment of osteoporosis, one can screen for mutations that increase or decrease bone mineral density, as observed for mice with mutations of the cathepsin K (Saftig et al., 1998) and osteoprotegerin genes (Bucay et al., 1998; Mizuno et al., 1998), respectively. This genetic approach is useful to analyze the role of a gene within the mammalian organism and its medical relevance.

[0079] The ability to measure parameters of mammalian physiology by screening in a mammalian organism stands in contrast to attempts to identify genes with disease relevance in lower model organisms such as Drosophila. The Drosophila system is useful for defining genetic pathways because of the ability to perform saturation screens for genetic modifiers of phenotypes that have been established already; yet, these genetic screens often are designed artificially and are removed from mammalian physiology. For instance, primary phenotypes to be used for modifier screens often are developed based upon overexpression, ectopic expression or expression of dominant or activated forms of a gene known to be involved in disease in the Drosophila eye (Therrien et al., 2000; Hirose et al., 2001; LaJeunesse et al., 2001; Schreiber et al., 2002; Sullivan and Rubin, 2002). Screens then are used to identify modifier genes that ameliorate or exacerbate the eye phenotype originally produced. These screens are able to elucidate genetic pathways and the types of genes that might play a role in a pathway of interest, but the corresponding mammalian genes still must be identified and tested for any relevance to the original disease or physiology of interest.

[0080] Saturation screens for genetic modifiers in non-mammalian organisms can provide clues for finding genes that may play a role in a disease-relevant pathway, but carrying out genetic screens directly in mammals for those genes is a preferred approach as more relevant to disease or physiology of interest. The question is whether the ability to scan a genome using saturation mutagenesis in invertebrate organisms outweighs the ability to screen directly in a more focused manner for genes that modulate disease-relevant mammalian physiology. Two of the challenges of conducting genetic screens in the mouse mammalian model have centered on the issues of the speed at which tractable genetic mutations can be generated and the large number of genes that must be processed to provide broad genomic coverage. While saturation modifier screens in mice need logistical support, it is possible to create mutations in all members of the so-called druggable classes of genes through gene targeting and gene trapping. This creates an opportunity to saturate the druggable mammalian genome, which is an important milestone in the evolution of drug discovery in the post-genome era. These druggable genes include secreted proteins that could be biotherapeutics themselves, potential targets for antibody-based therapeutics and small-molecule drug targets that belong to gene families that have proved themselves to be amenable to small molecule modulation based upon marketed drugs (Hopkins and Groom, 2002). The druggable genes include GPCRs (G-protein coupled receptors), ion channels, nuclear hormone receptors, key enzymes, kinases, proteases, secreted proteins and cell surface proteins. Indeed, one could argue that all mammalian disease or disease treatment pathways of interest probably contain druggable genes, so that by mutating all the druggable genes in the genome one can interrogate all pathways for points of therapeutic intervention.

[0081] Gene knock-out technologies were implemented on a large scale for saturation of the druggable genome. A program was instituted to knock out and analyze the resulting phenotypes for 5000 genes from the mammalian genome. The 5000 genes chosen are all members of druggable gene families. It was suggested that the druggable genome may be as small as about 3000 genes (Hopkins and Groom, 2002); therefore, screening 5000 genes is believed to be sufficient to saturate the mammalian druggable genome in order to identify those genes that have the greatest potential for disease treatment.

### 5.3 EFFECTIVELY SCREENING THE GENOME FOR NOVEL DRUG TARGETS

[0082] When generating knock-out mouse lines at a rate of 1000 per year, one needs a biological evaluation process that has a high probability of identifying potential drug targets, as assessed by the physiological consequences of gene disruption. A process that maximizes the potential to identify therapeutically significant genes was developed.

[0083] This screening process applies filters for genomic information. First, the genome is examined for members of druggable families. Second, knock-out mice are generated for selected genes at an average rate of 20 lines of mutant mice per week. A minimum cohort for initial evaluation is 16 animals; 8 Homozygous nulls, 4 Heterozygotes and 4 Wild-Type animals for each gene. This cohort size has produced reliable data from the primary screen upon which decisions for secondary screens can be made. This process involves the integration of bioinformatics, mouse genetics, robotics and high-speed physiological evaluation in an infrastructure with the ability to operate at the required rate. Generating, maintaining, genotyping and characterizing the required number of animals is logistically feasible.

[0084] An initial biological evaluation of the animals is a comprehensive clinical assessment of physiological parameters that can be measured effectively in high-throughput mode. Each test has relevance to one or more therapeutic areas and is designed to yield information that can be correlated directly with therapeutic intervention. This process includes an extensive battery of behavioral evaluations (neurology), blood pressure and heart rate measurements (cardiology) and a complete hematology survey supplemented with fluorescence-activated cell sorting (FACS) scans for immune function (immunology). The animals also are evaluated for body fat content, lean body mass (metabolism), bone mineral density, bone mineral content (endocrinology) and retinal integrity/vascularization (opthalmology). Effects on cell proliferation and reproductive organ development are studied (oncology) and fertility (reproductive biology) is assessed. This screening phase of biological investigation is referred to as Level 1 analysis.

[0085] This initial analysis of the physiological consequence of creating null mutations is designed to be unbiased with regard to potential outcome but to encompass phenotypes indicative of utility to our chosen therapeutic areas. All animals in all projects are submitted to the same tests in the same temporal sequence. This means that each test must be self-contained and have minimal impact on the outcome of subsequent tests. The aim of Level 1 analysis is to obtain a comprehensive understanding of gene function within the context of mammalian physiology. Variations from normal in any parameter are detected by comparison with cohort controls and with pooled historical data for all controls. Historical control data based on many animals give a good quantitative measure of normal values for each test and the level of background variation. Most of the tests are of primary importance to one particular therapeutic area (e.g. blood pressure and cardiology), but the total picture gained from this type of analysis is useful in identifying possible side-effects of target modulation. This allows the identification of targets with a potential for the development of target modulators.

[0086] In addition to therapeutic area-specific tests, multiple general diagnostic tests are performed. Level I pathology examines 52 tissues for the female and 53 tissues for the male. A complete gross necropsy is performed, with collection of tissues and photography of any significant gross lesions. Tissues are immersion-fixed in 10% neutral buffered formalin for 24 h, trimmed, processed to paraffin, embedded, sectioned at 4-5 mm, and stained with hematoxylin and eosin for histopathological examination. A board-certified pathologist examined tissues from one male and one female Homozygote for each project (Heterozygotes are examined for Homozygous lethal projects). Computer-assisted tomography (CAT) scanners operate effectively on mice and enable non-invasive evaluation of soft-tissue anatomy in addition to very refined skeletal analysis. Application of CAT (MicroCAT, ImTek Inc.) can be used to obtain morphological information non-invasively. All lesions are recorded and compared with controls in order to facilitate interpretation of phenotypes.

[0087] The output from all Level 1 tests is reduced to digital data and ported to a relational database. Data acquisition is rapid to the point that no Level 1 test is rate-limiting for the overall process. Numerical data is represented graphically with appropriate statistical tools, images are annotated by project scientists and interpretation of pharmaceutical relevance is summarized. It is therefore possible to gain a comprehensive view of the physiological function of every gene that is studied. This view encompasses those features that are most indicative of therapeutic potential in specific disease areas. Level 1 analysis has been a source of targets for drug discovery programs. Level 2 analysis entails the confirmation of Level 1 observations using additional animals and the application of specialized tests in a given project in reaction to Level 1 observations. Level 2 includes numerous therapeutic area-specific tests and challenge assays that cannot be used in the screening phase. Level 2 analysis may be triggered also through a hypothesis-driven approach. Level 3 analysis is designed for in-depth biological study in order to determine the merits of each target for assay development and high-throughput screening.

[0088] The decision to submit a given gene product to actual drug discovery is based on three criteria: modulation of the target by a small molecule, antibody or therapeutic protein could provide significant therapeutic effect with minimal or no discernable on-target side-effects; the target represents a potential breakthrough for the treatment of disease with significant advantages over existing therapies; and the program addresses a major unmet medical need. These criteria were applied to the analysis of multiple phenotypes and a number of projects were committed to further drug discovery following this analysis.

[0089] What follows is a brief description of the capabilities of the therapeutic area biology groups, including Level 1 and Level 2 tests that are most directly relevant to them.

### 5.4 HIGH-THROUGHPUT BIOLOGY: MAXIMIZING RETURN FROM REVERSE GENETICS

[0090] 5.4.1 Endocrinology/Metabolism

[0091] Three of the most prevalent diseases of endocrinology/metabolism are Type TI diabetes, obesity and osteoporosis. A comprehensive panel of physiological tests was implemented for each disease process that have proved to provide reliable clinical descriptions of disease-related symptoms. These tests include measures of body composition index, glucose homeostasis and bone mass.

[0092] 5.4.1.1 Level 1 Diabetes Tests

[0093] 5.4.1.1.1 Glucose Tolerance Test

[0094] The glucose tolerance test (GTT) is the standard for defining impaired glucose homeostasis in mammals. For example, intraperitoneal glucose tolerance tests showed improved glucose clearance and the serum glucose and insulin levels were significantly lower in protein tyrosine phosphatase-1B (PTP-1B) and SHIP2 knock-out mice (Klaman et al., 2000; Clement et al., 2001). These findings indicate improved insulin sensitivity, a possibility that confirmed by hyperinsulinemic-euglycemic clamp studies in the PTP-1B knock-out mice (Klaman et al., 2000). These results suggest that these two proteins are targets for new therapeutics aimed at Type II diabetes. In addition, the ability of retinoid X receptor agonists to lower serum glucose and insulin levels is used as evidence that these agonists act as insulin sensitizers in vivo (Mukherjee et al., 1997). These examples validate the effectiveness of GTT for the identification of potential targets for diabetes. Glucose tolerance tests are performed using a Lifescan glucometer. Animals are injected i.p. with 2 g/kg D-glucose, delivered as a 20% solution, and blood glucose levels are measured at 0, 30, 60 and 90 min after injection (Klaman et al., 2000).

[0095] 5.4.1.1.2 Urinalysis

[0096] Elevated glucose and/or ketone levels in urine are diagnostic markers for diabetes. Qualitative urinalysis is performed using Chemstrip 10 UA reagent strips (Roche) for the detection of glucose, bilirubin, ketones, blood, pH, protein, urobilinogen, nitrites and leukocytes in urine. Results are recorded using a Chemstrip 101 urine analyser.

[0097] 5.4.1.1.3 Serum Insulin

[0098] Serum insulin levels are also diagnostic markers for diabetes. Insulin levels are assayed using a sensitive rat radioimmunoassay kit from Linco, which is sensitive to 0.02 ng/ml insulin in serum.

[0099] 5.4.1.2 Level 2 Diabetes Tests

[0100] In Level 2, other tests are performed to verify and further define the role of targets in glucose homeostasis, for example, insulin tolerance test; insulin levels during GTT; insulin clearance (serum c-peptide/insulin ratio); measurement of serum free fatty acids, glycerol, glucagon, leptin, corticosterone; insulin content of pancreatic islets (radioimmunoassay); immunohistochemical analysis of pancreas for insulin, glucagon, somatostatin and pancreatic polypeptide; muscle and liver pathology, including glycogen and lipid content; pharmacological evaluation of liver slices, isolated soleus muscle and adipocytes.

[0101] 5.4.1.3 Level 1 Obesity Tests

[0102] Animal weight and percent body fat are measured in Level 1 to identify obesity phenotypes.

[0103] 5.4.1.3.1 Body Weight

[0104] All mice are weighed at 2, 4, 6, 8 and 16 weeks of age.

[0105] 5.4.1.3.2 Dual-Energy X-Ray Absorptiometry

[0106] Dual-energy X-ray absorptiometry (DEXA) is used to identify increased total body fat in melanocortin-3 receptor knock-out mice (Butler et al., 2000) and decreased total body fat in melanin concentrating hormone 1 receptor knock-out mice; the latter observation was confirmed by direct analysis of fat pad weights (Marsh et al., 2002). Such results suggest these proteins as targets for novel obesity therapies. In addition, DEXA was used to show that the small-molecule insulin mimetic cpd2 blocks the accumulation of body fat in mice fed a high fat diet, an observation confirmed by direct analysis of fat pad weights (Air et al., 2002). A DEXA instrument (Lunar Piximus) is used to record bone mineral density, bone mineral content, percent body fat and total tissue mass (Nagy and Clair, 2000; Punyanitya et al., 2000). Although primarily aimed at metabolic and osteoporotic conditions, DEXA is a sensitive measure of all-round wellbeing and often contributes to diagnosis in other therapeutic areas.

[0107] 5.4.1.4 Level 2 Obesity Tests

[0108] In Level 2, obesity targets are analyzed to determine whether they regulate metabolism, feeding, appetite or food absorption. Level 2 obesity tests include, for example, metabolic cages to measure food intake, water intake and fat malabsorption; Mini-Mitter telemetry for physical activity, core body temperature, drinking frequency and feeding frequency and duration; Oxymax measurement of metabolic rate and physical activity; home cage diet studies, including high-fat-diet challenge, food intake measurement and pair-feeding studies; fat mass by DEXA or nuclear magnetic resonance (Bruker Minispec); body composition analysis (analysis of carcass fat mass by Sohxlet; fat pad and organ weights); crosses to ob/ob mice; pharmacological challenge with leptin, melanocortin TI and neuropeptide Y; blood pressure.

[0109] 5.4.1.5 Level 1 Osteoporosis Tests

[0110] 5.4.1.5.1 Bone Microcomputed Tomography

[0111] Osteoporosis is characterized by a decreased bone mineral density due to a deficiency in bone production or increased bone absorption resulting in brittle bones. Specialized microcomputed tomography (micro-CT) machines have been developed with the capacity to provide quantitative and imaging data on the three-dimensional structure of mouse bones. This technique is used to demonstrate the efficacy of parathyroid hormone in a mouse model of osteoporosis (Alexander et al., 2001) and is used to describe in three dimensions the changes in bone resulting from the osteopetrotic mutation, which leads to osteopetrosis (Abe et al., 2000). A Scanco Medical mCT40 machine is used for measurements of bone mineral density. This machine permits visualization of trabecular bone structure, which is critical in evaluating overall bone quality. This is a much more sensitive analysis of bone than can be achieved using DEXA alone and is a specialized test for osteoporosis that we have implemented as part of our Level 1 analysis.

[0112] 5.4.1.6 Level 2 Osteoporosis Tests

[0113] In Level 2, targets are analyzed to determine whether changes in bone mineral density are due to effects on bone deposition or bone resorption using various tests, for example, DEXA; micro-CT; undecalcified bone histomorphometry; bone histopathology; measurement of urinary helical peptide.

[0114] 5.4.2 Cardiology

[0115] The major disease areas of interest in cardiology are hypertension, thrombosis, atherosclerosis and heart failure.

[0116] 5.4.2.1 Level 1 Tests

[0117] 5.4.2.1.1 Blood Pressure

[0118] Blood pressure measurements facilitate finding targets that, upon inhibition, lead to a reduction in blood pressure. Angiotensin-converting enzyme inhibitors and angiotensin receptor antagonists are effective drugs in the treatment of hypertension. Both knock-outs have low blood pressure. Blood pressure is measured using a non-invasive computerized tail-cuff system, the Visitech Systems BP-2000. This technique is a validated approach (Krege et al., 1995; Ito et al., 1995; Oliver et al., 1998; Sugiyama et al., 2001). Ten measurements of blood pressure are made per day on each of 4 days for each animal evaluated. Results are recorded as the pooled average of 40 measurements.

[0119] 5.4.2.1.2 Zymosan Challenge Assay

[0120] Peritoneal leukocyte recruitment assays are used to identify targets that may regulate the inflammatory component of atherosclerosis. These assays detect abnormalities in immune cell recruitment to a site of inflammation. It has been shown in mutant such as C-C chemokine receptor 2 (CCR2) knock-outs that a defect in immune cell recruitment in these assays correlates well with a significant reduction in the inflammatory component of atherosclerosis and the subsequent plaque formation (Boring et al., 1997).

[0121] 5.4.2.1.3 Blood Lipids

[0122] High cholesterol and triglyceride levels are recognized risk factors in the development of cardiovascular disease. Measuring blood lipids facilitates finding the biological switches that regulate blood lipid levels; inhibition of these switches should lead to a reduction in the risk for cardiovascular disease.

[0123] 5.4.2.1.4 Optic Fundus Photography and Angiography

[0124] Optic fundus photography is performed on conscious animals using a modified Kowa Genesis small-animal-fundus camera (Hawes et al., 1999). Intraperitoneal injection of fluorescein permits the acquisition of direct light fundus images and fluorescent angiograms for each examination. In addition to direct opthalmological changes, this test can detect retinal changes associated with systemic diseases such as diabetes and atherosclerosis.

[0125] 5.4.2.2 Level 2 Cardiology Tests

[0126] Level 2 cardiology tests include, for example, platelet aggregation; vascular injury by carotid cuff, chemically induced thrombosis; Poloxamer-induced atherosclerosis; aortic banding; permanent coronary occlusion; crosses with apolipoprotein E, low-density lipoprotein receptor and knock-outs.

[0127] 5.4.3 Immunology

[0128] Our focus indications include acute inflammation, inflammatory bowel disease, transplantation, asthma, allergy, multiple sclerosis, rheumatoid arthritis and blood coagulation. The process of hematopoietic cell development and the regulation of mature immune cell function share several key signaling pathways, which are the result of similar molecular or cellular interactions. As an example, activation events via the antigen-specific T-cell receptor and co-stimulatory molecules are indispensable for both normal T cell development in the thymus and normal T-cell function during an immune response. Comprehensive phenotypic analysis of functionally relevant immune cell subpopulations in knock-out mice is essential for two reasons: it can reveal the role of a novel gene or expose the central role of a known gene in immune cell development and function; and at the same time it can provide the first hint about the potential mechanism that can lead to the observed immune deficiency.

[0129] 5.4.3.1 Level 1 Tests

[0130] 5.4.3.1.1 Complete Blood Cell Count

[0131] Evaluation of the cellular components of the immune system in knock-out mice and Wild-Type littermates is performed by automated determination of the absolute numbers of various cell types and ratios in the peripheral blood, i.e. complete blood cell count (CBC). This analysis is followed by a more detailed study using flow cytometry, which is designed to determine the relative proportions of CD4+ and CD8+ T cells, B cells, NK cells and monocytes in the mononuclear cell population. In the absence of a single molecular entity, disturbances in the proportion of any of the analyzed cell types could signal a key role for that molecule in governing the immune system, as exemplified in the following knock-out phenotypes.

[0132] The immunosuppressants cyclosporin A and FK506, which are useful to prevent transplant rejection, inhibit the immune response by inhibiting the catalytic activity of one or both isoforms of calcineurin A (can) in lymphocytes. Mice deficient in the b-isoform of the enzyme have a significant reduction in peripheral T lymphocytes due to 75% and 65% reductions in CD4+ and CD8+ positive thymocytes, respectively (Bueno et al., 2002). Mice deficient in expression of granulocyte colony-stimulating factor (G-CSF) exhibit chronic neutropenia with a 70-80% reduction in circulating neutrophils, whereas recombinant GCSF (Neupogen) stimulates neutrophil production and is used to treat neutropenia (Lieschke et al., 1994).

[0133] This test requires 135 μl of whole blood and employs a Cell-Dyn 3500R hematology analyzer. It reports on white blood cell count, neutrophils, lymphocytes, monocytes, eosinophils, basophils, red blood cell count and other standard hematology markers.

[0134] 5.4.3.1.2 Blood Chemistry

[0135] A Cobas Integra 400 serum analyzer is used to measure a range of soluble serum components using approximately 85 ml of serum. Serum levels are recorded for alkaline phosphatase, albumin, total cholesterol, triglycerides, blood urea nitrogen, glucose, alanine aminotransferase, bilirubin, phosphate, creatinine, calcium and uric acid.

[0136] 5.4.3.1.3 Fluorescence-Activated Cell Sorting (FACS)

[0137] Flow cytometry is designed to determine the relative proportions of CD4+ and CD8+ T cells, B cells, NK cells and monocytes in the mononuclear cell population. A Becton-Dickinson FACSCalibur 3-laser FACS machine is used to assess immune status. For Level 1 screening, this machine records CD4+/CD8−, CD8+/CD4−, NK, B cell and monocyte numbers, in addition to the CD4+/CD8+ ratio.

[0138] 5.4.3.1.4 Ovalbumin Challenge

[0139] Chicken ovalbumin (OVA) is a T-cell-dependent antigen used as a model protein for studying antigen-specific immune responses in mice. It is non-toxic and inert and therefore will not cause harm to the animals even if no immune response is induced. The murine immune response to OVA has been well characterized, to the extent that the immunodominant peptides for eliciting T-cell responses have been identified. Anti-OVA antibodies are detectable 8-10 days after immunization using enzyme-linked immunosorbent assay, and determination of different isotypes of antibodies gives further information on the complex processes that may lead to a deficient response in genetically engineered mice.

[0140] The cyclosporin-mediated suppression of immune response once again demonstrates the similarity of phenotype using the suppressive agent or the genetic knock-out mice in this challenge model. Both cyclosporin-treated animals and mice knocked out for calcineurin A, in this case the a-isoform, show deficiency in T-cell-dependent antigen response (Puignero et al., 1995; Zhang et al., 1996).

[0141] Another example is the cytokine tumor necrosis factor a (TNF-a), whose important role in modulating inflammatory and antibody responses is well known. Two treatment options are available for patients with rheumatoid arthritis, a soluble receptor (Enbrel) and antibody (Remicade), both based on blocking the TNF-a activity. Underlining the effectiveness of drug therapy, mice deficient in TNF-a exhibit impaired humoral response to both T-cell dependent and T-cell-independent antigens (Pasparakis et al., 1996).

[0142] It is important to note that, even without antigenic challenge, the make-up of the immunoglobulin repertoire in a knock-out mouse is highly informative, because isotype switching of immunoglobulins is dependent on the interaction between B and T lymphocytes. Examples of the type of receptors required for normal function of T and B cells are the so-called co-stimulatory molecules, including CD28 and CD40 receptors, both of which are targets of antibody-based therapy with ongoing clinical trials for the treatment of various autoimmune diseases. In this case, mice deficient in either of these receptors register an impairment in immunoglobulin class switching, which is detectable in the serum of the animals (Shahinian et al., 1993, Kawabe et al., 1994). The protocol assesses the ability of mice to raise an antigen-specific immune response. Animals are injected i.p. with 50 mg of OVA emulsified in Complete Feund's Adjuvant; 8 days later the serum titer of anti-OVA antibodies (IgG1 and IgG2 subclasses) is measured.

[0143] 5.4.3.2 Level 2 Immunology Tests

[0144] The following Level 2 tests are used to test for disease indication for a given target, for example, T-Cell activation, CD3 monoclonal antibody (mAb)+CD28 mAb induced; B-Cell activation, CD40 mAb+IL4 induced; mixed lymphocyte reaction provoked by irradiated BALB/C spleen cells; lipopolysaccharide challenge to evaluate acute phase response; Oxazolone sensitization and challenge for contact hypersensitivity; ovalbumin vaccine model; bovine collagen-induced arthritis; dextran sulfate gavage: inflammatory bowel disease model; ovalbumin+alum immunization followed by aerosol delivery of ovalbumin as asthma model; allograft rejection; blood coagulation assays: prothrombin time and activated partial thromboplastin; platelet aggregation; bone marrow transplantation.

[0145] 5.4.4 Neurology

[0146] Neurology focuses on the identification of targets for anxiety, depression, schizophrenia, pain, sleep disorders, learning and memory disorders, neuromuscular disease and neurodegenerative disorders. The Level 1 assays have been based upon the behavioral phenotypes associated with knock-outs of known central nervous system targets as well as the actions of known drugs.

[0147] 5.4.4.1 Level 1 Tests

[0148] 5.4.4.1.1 Open Field Test

[0149] Several targets of known drugs have exhibited phenotypes in the open field test. These include knock-outs of the serotonin transporter, the dopamine transporter (Giros et al., 1996), and the GABA receptor (Homanics et al., 1997). An automated open-field assay is used to address changes related to affective state and exploratory patterns related to learning. First, the field (40×40 cm) is relatively large for a mouse, which is designed to pick up changes in locomotor activity associated with exploration. In addition, there are four holes in the floor to allow for nose-poking, an activity specifically related to exploration. Several factors have been designed to heighten the affective state associated with this test. The open-field test is the first experimental procedure in which the mice are tested, and the measurements taken are the subjects' first experience with the chamber. In addition, the open field is brightly lit. All these factors will heighten the natural anxiety associated with novel and open spaces. Thus, pattern and extent of exploratory activity, especially the center-to-total distance traveled ratio, may be able to discern changes related to susceptibility to anxiety or depression. A large arena (40 cm×40 cm, VersaMax animal activity monitoring system from AccuScan Instruments) with infrared beams at three different levels is used to record rearing, hole poke and locomotor activity. The animal is placed in the center and its activity is measured for 20 min. Data from this test are analyzed in five 4-min intervals. The total distance traveled (cm), vertical movement number (rearing), number of hole pokes and the center-to-total distance ratio are recorded.

[0150] 5.4.4.1.2 Inverted Screen

[0151] This test is used to measure motor strength/coordination. Untrained mice are placed individually on top of a square (7.5 cm×7.5 cm) wire screen that is mounted horizontally on a metal rod. The rod is rotated 180° so that the mice are on the bottom of the screens. The following behavioral responses are recorded over a 1-min testing session: fell off, did not climb and climbed up.

[0152] 5.4.4.1.3 Functional Observation Battery

[0153] This is a modified SHIRPA (Rogers et al., 2001) analysis in which the animals are scored systematically for 37 individual behavioral and physical characteristics, such as vision, response to touch, palpebral closure, etc. It is a formalization of the complete observation of the whole organism, which often gives the first hint as to phenotype.

[0154] 5.4.4.1.4 Hot Plate and Formalin Paw

[0155] The 55° C. hot plate is a standard assay for measuring nociception in animals. Knock-out of either the m-opioid receptor (Sora et al., 1997) or COX 1 (Ballou et al., 2000) (both targets of analgesic drugs) results in effects on response latency in the hot-plate assay. Analgesia, such as that produced by morphine and other strong analgesics, is also detected using this assay. The hot-plate test is carried out by placing each mouse on a small, enclosed 55° C. hot plate (Hot Plate Analgesia Meter, Columbus instruments). Latency to a hind-limb response (lick, shake or jump) is recorded, with a maximum time on the hot plate of 30 s. Each animal is tested once.

[0156] The formalin paw assay is useful for hyperalgesia, as well as initial acute nociception. Recently, this assay has been automated and thus has become available for use in high-throughput analysis. Drugs that address novel mechanisms of hyperalgesia, without the side-effects of potent non-steroidal anti-inflammatory drugs, will be very useful new therapeutics.

[0157] 5.4.4.1.5 Prepulse Inhibition

[0158] Prepulse inhibition is a pre-attentive process that has been shown to be deficient in patients with schizophrenia. This reduced ability to filter out environmental stimuli may contribute to both positive and negative symptoms of the disease. Antipsychotics can ameliorate some deficits in prepulse inhibition, therefore genetic inhibition of a target that can increase prepulse inhibition may presage a small-molecule therapeutic that can help patients with their disorder. The prepulse inhibition of the startle response assay is an automated measure of the startle response both with and without various intensities of prepulses. Targets whose genetic inhibition produces changes in prepulse inhibition without changes in the startle response itself may be excellent for the discovery of new therapeutics.

[0159] This test employs a San Diego Instruments SR-lab startle response system. Prepulse inhibition of the acoustic startle reflex occurs when a loud 120 decibel (dB) startle-inducing tone is preceded by a softer (prepulse) tone. The prepulse inhibition paradigm consists of six different trial types (70 dB background noise, 120 dB alone, 74+120 dB at postpartum day 4, 78+120 dB at postpartum day 8, 82+120 dB at postpartum day 12, and 90+120 dB at postpartum day 20) each repeated in pseudorandom order six times for a total of 36 trials. The maximum response to the stimulus (Vmax) is averaged for each trial type. The percentage inhibition of the animal's response to the startle stimulus is calculated for each prepulse intensity and then graphed. This test is being used increasingly as a model of human schizophrenia and a test for antipsychotic drugs.

[0160] 5.4.4.1.6 Tail Suspension

[0161] The tail-suspension and forced-swim assays are two assays for the discovery and validation of novel antidepressants. The knock-out of the noradrenalin transporter, one target of the antidepressant Welbutrin™, demonstrates an increased struggle time in the tail-suspension assay (Xu et al., 2000). The tail-suspension assay used is automated, giving it added objectivity and making it appropriate for high-throughput analysis. Both of these assays measure the efforts of the subject to extricate itself from an inescapable situation, i.e. they measure a tendency toward ‘giving up’. Compounds known to reduce depressive symptoms in patients reduce the immobility time in tail suspension, therefore gene knock-outs that result in decreased time spent being immobile, in the absence of any general increase in activity levels (as measured in assays such as the open field), indicate targets for the discovery of novel therapeutics for the treatment of depression. In this particular set-up (PHM-300 Tail Suspension Test Cubicle) a mouse is suspended by its tail for 6 min, and in response the mouse will struggle to escape from this position. Extended struggle is taken as antidepressive behavior, whereas curtailed struggle is interpreted as depressive.

[0162] 5.4.4.1.7 Circadian Rhythms

[0163] Changes in sleep patterns can be detected by examining activity continuously over a period of days and nights. An infrared beam system is used that monitors the horizontal locomotor activity of individual mice in their home cage environment for 3 days and nights. This facilitates obtaining an accurate indication of their sleep-wake cycle as well as overall locomotor activity rates. Changes in the normal circadian rhythm or an increase or decrease in the periods of activity during the normal sleep cycle indicates genes controlling sleep and indicates therapeutic utility for other conditions, such as depression or schizophrenia, in which normal sleep patterns are disrupted.

[0164] 5.4.4.1.8 Trace Aversive Conditioning

[0165] Cognition, especially the loss of cognitive abilities in dementias such as Alzheimer's disease, later-stage Parkinson's and Huntington's disease, as well as in schizophrenia, is a major focus for drug discovery. This area has been hampered particularly by the lack of rapid assays that specifically target the learning and memory losses associated with these diseases, i.e. learning and memory dependent on areas of the brain such as the hippocampus. Assays generally used, such as the eight-arm radial arm maze or delayed-nonmatching-to-sample procedures require significant time and training. However, animals learn aversive conditioning very easily and this can be combined with ‘trace’ conditioning, in which there is a time interval between the signal stimulus and the aversive stimulus itself, to provide a rapidly (3-5 trials) learned response that is dependent upon the function of the hippocampus. As with most of our other assays, this assay has been automated to increase objectivity and make it appropriate for high throughput behavioral analysis. Gene knock-outs that affect learning and memory in this assay, without changes in basic sensory or motor function, will indicate targets for new treatments for cognitive disorders.

[0166] 5.4.4.2 Level 2 Neurology Tests

[0167] Level 2 neurology tests include, for example, neurochemical analysis of dopamine, norepinephrine, serotonin and their primary metabolites in urine, blood, cerebrospinal fluid (CSF) and brain tissue; levels of melatonin and homocysteine in urine, blood, CSF and brain tissue; in situ hybridization/immunocytochemical analyses using Neo, LacZ or radioactivity; immunohistochemical analyses of markers of choice; pharmacological challenges in vivo; electroretinogram (vision); auditory brainstem response (hearing); detailed neuroanatomical/pathological analysis of brain, spinal cord, eye, ear and peripheral ganglia; field potential and whole-cell patch clamp in brain slices; whole-cell patch clamp of cultured neurons and other cells (HEK, etc.); fluorescence imaging of brain slices and cells; olfactory discrimination test (olfaction and social recognition); trace and delay aversive conditioning; social interaction and social recognition tests; zero maze (anxiety).

[0168] 5.4.5 Oncology

[0169] The targets of oncology therapeutics fall into three major categories: cytotoxic agents such as DNA damaging agents or inhibitors of tubulin or topoisomerase, tissue-specific growth regulators such as estrogen receptor blockers and leutinizing hormone blockers, and disease-specific antitumor agents such as Gleevec™, Herceptin™ and Rituxan™. The oncology Level 1 screen is directed at targets for cancer drugs that fall into the same categories operating through control points in mammalian cell cycle, apoptosis or response to DNA damage.

[0170] 5.4.5.1 Level 1 Tests

[0171] 5.4.5.1.1 Embyronic Lethality and Reduced Viability

[0172] Targets for cytotoxic agents are identified first by embryonic lethality or reduced viability. These phenotypes are examined further to determine effects on cell cycle, apoptosis and angiogensis.

[0173] 5.4.5.1.2 Tissue-Specific Growth Regulation

[0174] Targets affecting growth, differentiation and function of reproductive organs are examined through histopathologic survey of males, virgin females and lactating female mice.

[0175] 5.4.5.1.3 Cell Proliferation

[0176] Oncogene targets that have a direct effect on cell cycle, DNA repair or apoptosis can manifest their function through changes in adult skin fibroblast proliferation. Punch biopsies are taken of skin samples from the backs of mutant mice and cohort controls. These are developed into primary fibroblast cultures and the fibroblast proliferation rates are measured in a controlled protocol. The ability of this assay to detect hyperproliferative and hypoproliferative phenotypes has been demonstrated with p53 and Ku80.

[0177] 5.4.5.2 Level 2 Oncology Tests

[0178] Targets identified from Level 1 are characterized further for their role in mammalian tumorigenesis. Focus is placed on targets that are highly expressed in human tumor cell lines and capable of driving the tumor phenotype as demonstrated by gene knock-down studies or overexpression-driven tumorigenesis models in nude mice.

[0179] 5.4.5.2.1 Quantitative Polymerase Chain Reaction for Analysis of Expression in cancerous and normal cell lines and tissues

[0180] Quantitative polymerase chain reaction of candidate genes is done using cDNA prepared from 66 cancer and nine normal cell lines from ATCC, seven primary cell strains from Clonetics, about three cancer lines and matched adjacent normal tissue controls from Ambion, MCF-7 breast cancer cells +/−17b-estradiol and LNCaP prostate cancer cells +/−dihydrotestosterone. This is done to identify targets that are overexpressed in cancerous cell lines relative to normal cell and tissue controls.

[0181] 5.4.5.2.2 Gene Knock-Down Studies with Short Interfering RNA

[0182] Cancer cell lines determined to be overexpressing a target of interest are cotransfected with 3-6 short hairpin RNA vectors and blasticidin resistance vectors or synthetic short interfering RNAs to knock down the expression of specific targets. Assessment is made of the effects of RNA interference on in vitro proliferation, anchorage-dependent and anchorage-independent colony formation and the ability of cell lines to form tumors in nude mice.

[0183] 5.4.5.2.3 Overexpression Studies for Putative Oncogenes

[0184] Oncology targets are tested to determine whether they can drive tumor formation. Full-length genes of interest are cloned into a mammalian expression vector and co-transfected into NIH3T3 and RK3E cells with a blasticidin-resistance vector. The resulting blasticidin-resistant polyclonal pools are tested in vitro for acquisition of anchorage independence, reduced serum dependence and increased focus-forming ability. Stably transfected cell lines expressing exogenous cDNAs of interest are then analyzed for their ability to form tumors in athymic nude mice.

### 5.5 CONCLUSIONS

[0185] Described here is a new conceptual framework for the discovery of drugs using the mammalian genome as a starting point in the analysis. The framework requires genetic antagonism of the drug target combined with a comprehensive in vivo physiological characterization of target function before any chemical screens for pharmaceutical agents are launched. This process constitutes a powerful genetic screen for the targets that allow for maximizing therapeutic effects while minimizing side-effects resulting from therapies modulating the target. In addition, determination of the role of the target in mammalian physiology enables identification of the medical indications for the therapeutics to be developed. Although this may appear an obvious prerequisite, it is important to note that many screens are conducted today against molecular targets for which the medical utility is either completely unknown or hypothesized based on only biochemical, gene expression or lower model organism data.

[0186] The mammalian genetic screen described here is engineered specifically to reveal those genes that encode control points in physiology useful in the treatment of major diseases. The tests described here measure important medical parameters of physiology that are associated with points of therapeutic intervention and medical needs. Additionally, the tests are robust in their application to thousands of animals.

[0187] The screen used to identify therapeutic targets can be applied again to demonstrate the efficacy and potential side-effects of candidate therapeutic agents. This broad phenotypic screen, guided by mammalian genetics, provides a new performance level for the preclinical testing of compounds that are developed to interact with chosen targets. The screen enables identification of the key biomarker indicators of efficacy that should be followed when a compound is at the first-time-in-mammal stage. The genetic tools available for preclinical studies include not only Wild-Type animals but also knock-outs and knock-ins containing the actual human gene targets. The knock-out animals provide guidance for determining the efficacy of novel therapeutic agents. Another powerful aspect of the preclinical testing capabilities includes the treatment of knock-out animals themselves with compounds specific for the target. In such a scenario any effects seen, outside those associated with the knock-out state, are, by definition, off-target side-effects attributable to the compound itself. The ability to manipulate the mouse genome at will provides a powerful tool to define accurately the on-target versus off-target side-effects produced by a given agent. Such new approaches are also very useful in combination with medicinal chemistry strategies to optimize therapeutic agents.

[0188] In the post-genome era, a systematic in vivo screen for targets is a precondition for high-throughput screening of small molecule therapeutics to identify the targets for treatments for disease.

### 5.6 REFERENCES

[0189] Abdelilah, S., et al. (1996) Development 123, 217-227.
[0190] Abe, S., et al. (2000) Br. J. Radiol. 73, 1078-1082.
[0191] Abuin, A., et al. (2002) Trends Biotechnol. 20, 36-42.
[0192] Accili, D., et al. (1996) Nat. Genet. 12, 106-109.
[0193] Air, E. L., et al. (2002) Nat. Med. 8, 179-183.
[0194] Alexander, J. M., et al. (2001) J Bone Miner. Res. 16, 1665-1673.
[0195] Baier, H., et al. (1996) Development 123, 415-425.
[0196] Ballou, L. R., et al. (2000) Proc. Natl. Acad. Sci. USA 97, 10272-10276.
[0197] Boring, L., et al. (1997) J. Clin. Invest. 100, 2552-2561.
[0198] Brand, M., et al. (1996) Development 123, 129-142.
[0199] Brockerhoff, S. E., et al. (1995) Proc. Natl. Acad. Sci. USA 92, 10545-10549.
[0200] Bucay, N., et al. (1998) Genes Dev. 12, 1260-1268.
[0201] Bueno, O. F., et al. (2002) Proc. Natl. Acad. Sci. USA 99, 9398-9403.
[0202] Butler, A. A., et al. (2000) Endocrinology 141, 3518-3521.
[0203] Chalfie, M., et al. (1981) Cell 24, 59-69.
[0204] Chen, J. N., et al. (1996) Development 123, 293-302.
[0205] Clement, S., et al. (2001) Nature 409, 92-97.
[0206] Giros, B., et al. (1996) Nature 379, 606-612.
[0207] Golling, G., et al. (2002) Nat. Genet. 31, 135-140.
[0208] Granato, M., et al. (1996) Development 123, 399-413.
[0209] Haffter, P., et al. (1996) Development 123, 1-36.
[0210] Hawes, N. L., et al. (1999) Mol. Vis. 5, 22.
[0211] Hedgecock, E. M., et al. (1983) Science 220, 1277-1279.
[0212] Hirose, F., et. al. (2001) Mol. Cell Biol. 21, 7231-7242.
[0213] Homanics, G. E., et al. (1997) Proc. Natl. Acad. Sci. USA 94, 4143-4148.
[0214] Hopkins, A. L. and Groom, C. R. (2002) Nat. Rev. Drug Discov. 1, 727-730.
[0215] Horvitz, H. R. and Sulston, J. E. (1980) Genetics 96, 435-454.
[0216] Ito, M., et al. (1995) Proc. Natl. Acad. Sci. USA 92, 3521-3525.
[0217] Joshi, R. L., et al. (1996) EMBO J. 15, 1542-1547.
[0218] Kawabe, T., et al. (1994) Immunity 1, 167-178.
[0219] Kelsh, R. N., et al. (1996) Development 123, 369-389.
[0220] Klaman, L. D., et al. (2000) Mol. Cell Biol. 20, 5479-5489.
[0221] Krege, J. H., et al. (1995) Hypertension 25, 1111-1115.
[0222] LaJeunesse, D. R., et al. (2001) Genetics 158, 667-679.
[0223] Leighton, P. A., et al. (2001) Nature 410, 174-179.
[0224] Lieschke, G. J., et al. (1994) Blood 84, 1737-1746.
[0225] Malicki, J., et al. (1996a) Development 123, 263-273.
[0226] Malicki, J., et al. (1996b) Development 123, 275-283.
[0227] Marsh, D. J., et al. (2002) Proc. Natl. Acad. Sci. USA 99, 3240-3245.
[0228] Mitchell, K. J., et al. (2001) Nat. Genet. 28, 241-249.
[0229] Mizuno, A., et al. (1998) Biochem. Biophys. Res. Commun. 247, 610-615.
[0230] Mukherjee, R., et al. (1997) Nature 386, 407-410.
[0231] Mullins, M. C., et al. (1994) Curr. Biol. 4, 189-202.
[0232] Nagy, T. R. and Clair, A. L. (2000) Obes. Res. 8, 392-398.
[0233] Neuhauss, S. C., et al. (1996) Development 123, 357-367.
[0234] Nusslein-Volhard, C. and Wieschaus, E. (1980) Nature 287, 795-801.
[0235] Odenthal, J., et al. (1996) Development 123, 103-115.
[0236] Oliver, P. M., et al. (1998) Proc. Natl. Acad. Sci. USA 95, 2547-2551.
[0237] Pasparakis, M., et al. (1996) J. Exp. Med. 184, 1397-1411.
[0238] Piotrowski, T., et al. (1996) Development 123, 345-356.
[0239] Puignero, V., et al. (1995) Int. Arch. Allergy Immunol. 108, 142-147.
[0240] Punyanitya, M., et al. (2000) FASEB J. 14, 497.
[0241] Rogers, D., et al. (2001) Neurosci. Lett. 306, 89-92.
[0242] Saftig, P., et al. (1998) Proc. Natl. Acad. Sci. USA 95, 13453-13458.
[0243] Scarff, K. L., et al. (1999) Gastroenterology 117, 605-618.
[0244] Schier, A. F., et al. (1996) Development 123, 165-178.
[0245] Schreiber, S. L., et al. (2002) Genesis 33, 141-152.
[0246] Shahinian, A., et al. (1993) Science 261, 609-612.
[0247] Solnica-Krezel, L., et al. (1996) Development 123, 67-80.
[0248] Sora, I., et al. (1997) Proc. Natl. Acad. Sci. USA 94, 1544-1549.
[0249] Spicer, Z., et al. (2000) J. Biol. Chem. 275, 21555-21565.
[0250] Stemple, D. L., et al. (1996) Development 123, 117-128.
[0251] Sugiyama, F., et al. (2001) Genomics 71, 70-77.
[0252] Sullivan, K. M. and Rubin, G. M. (2002) Genetics 161, 183-193.
[0253] Therrien, M., et al. (2000) Genetics 156, 1231-1242.
[0254] Walke, D. W., et al. (2001) Curr. Opin. Biotechnol. 12, 626-631.
[0255] Wiles, M. V., et al. (2000) Nat. Genet. 24, 13-14.
[0256] Xu, F., et al. (2000) Nat. Neurosci. 3, 465-471.
[0257] Zambrowicz, B. P. and Sands, A. T. (2003) Nat. Rev. Drug Discov. 2, 38-51.
[0258] Zambrowicz, B. P., et al. (1998) Nature 392, 608-611.
[0259] Zhang, B. W., et al. (1996) J. Exp. Med. 183, 413-420. 278.

### Example 6

### A Mouse Library with 6 Distinct Mouse Mutants

[0260] A mouse library of 6 distinct mouse mutants or mouse lines was generated. The following table (Table 1) describes the vector used to generate each line. Each vector is a gene trap vector that may integrate into a gene in the mouse genome and result in a gene transcript comprising vector sequences and exon sequences from the gene. The polynucleotide sequences referenced in Table 1, and disclosed in the appended Sequence Listing, were obtained by sequencing transcripts that include sequences of the gene trap vector. Table 1 also provides phenotypic data of each mouse line.

TABLE 1

| Line | | SEQ | |
|---|---|---|---|
| No. | Vector: | ID: | Phenotype: |
| 1. | VICTR48 | 9 | Mutation of a hypothetical mouse gene (1700061G19Rik) resulted |
| | | | in enhanced learning/memory in female (−/−) mice. Transcript was |
| | | | absent by RT-PCR. |
| 2. | VICTR48 | 10 | Mutation of the gene encoding the ortholog of human |
| | | | immunoglobulin superfamily, member 9 (IGSF9) resulted in |
| | | | increased cholesterol levels in (−/−) mice. Transcript was absent by |
| | | | RT-PCR. |
| 3. | VICTR48 | 11 | Mutation of the gene encoding the ortholog of a human |
| | | | hypothetical kinase resulted in hydrocephalus, cerebellar cortical |
| | | | dysplasia, and neurological and ophthalmological abnormalities in |
| | | | (−/−) mice. Male (−/−) mice exhibited impaired glucose tolerance. |
| | | | Transcript was absent by RT-PCR. |
| 4. | VICTR48 | 12 | Mutation of the gene encoding the ortholog of human NAD kinase |
| | | | (FLJ13052) resulted in lethality of (−/−) mutants. Male (+/−) mice |
| | | | exhibited increased serum insulin and impaired glucose tolerance. |
| | | | The (+/−) mice also exhibited decreased MCP-1, TNF-alpha, and |
| | | | IL-6 responses to LPS challenge. |
| 5. | VICTR48 | 13 | Mutation of the gene encoding the ortholog of human procollagen |
| | | | C-endopeptidase enhancer 2 (PCOLCE2) resulted in growth |
| | | | retardation in male (−/−) mice. Transcript was absent by RT-PCR. |
| 6. | VICTR48 | 14 | Mutation of the gene encoding the ortholog of a human |
| | | | hypothetical leucine-rich repeat protein (MGC25027) resulted in a |
| | | | decreased inflammatory response in (−/−) mice. Transcript was |
| | | | absent by RT-PCR. |

[0261] The polynucleotide sequences referenced in Table 1 were used to search the Genbank database to identify mouse polynucleotide sequences by accession numbers (Mouse Nucleotide Accession Nos.) that represent the full length transcript corresponding to the gene carrying the engineered mutation in each mouse line of Table 1. Also obtained were the corresponding polypeptide sequences by accession numbers (Mouse Protein Accession Nos.). Also obtained were the human polynucleotide (Human Nucleotide Accession Nos.) and polypeptide sequences (Human Protein Accession Nos.) that correspond to the mouse sequences. The Genbank accession numbers for all four types of sequences are shown below in Table 2 for each of the 6 mouse lines.

TABLE 2

| | Mouse | | | |
|---|---|---|---|---|
| | Nucleotide | Mouse Protein | Human Nucleotide | Human Protein |
| Line No. | Accession Nos.: | Accession Nos.: | Accession Nos.: | Accession Nos.: |
| 1. | AK028078 | XP_140052 | N/A | N/A |
| 2. | NM_033608 | NP_291086 | NM_020789 | Q9P2J2 |
| 3. | NM_033608 | NP_291086 | NM_020789 | Q9P2J2 |
| 4. | NM_010497 | O88844 | NM_005896 | O75874 |
| 5. | NM_029620 | NP_083896 | NM_013363 | NP_037495 |
| 6. | NM_177303 | P59383 | NM_152611 | Q5JWV6 |

### Example 7

### Polynucleotides Sequences Obtained From Hybrid Transcripts

[0262] Gene trap vectors of the current invention were introduced into ES cells. A selection protocol was employed to identify cells with a copy of a gene trap vector integrated into their genome. Hybrid transcripts were identified and isolated from the cells following selection for sequencing of non-vector sequences included in those hybrid transcripts, i.e., sequences from the mouse genome and trapped in the hybrid transcript (trapped sequences). These assays were carried our as discussed herein and in United States Patent Application Number 20050059060, which is incorporated herein for that and any other purpose. Each trapped sequence obtained is believed to represents at least a part of a gene or an entire gene that is expressed in ES cells and/or other cell types. Thus, each trapped sequence is believed to be a sequence tag or sequence identifier to identify a gene in a mouse, or another species that is sufficiently closely related to mouse. Trapped sequences are shown in SEQ ID NOS. 15 to 3423.

[0263] The present invention is not to be limited in scope by the specific embodiments described herein, which are intended as single illustrations of individual aspects of the invention, and functionally equivalent methods and components are within the scope of the invention. Indeed, various modifications of the invention, in addition to those shown and described herein, will become apparent to those skilled in the art from the foregoing description. Such modifications are intended to fall within the scope of the appended claims. All cited publications, patents, and patent applications are herein incorporated by reference in their entirety for any purpose.

The application's sequence listing, which the Patent Office published only in electronic form, follows.

SEQUENCE LISTING (3423 sequences)

SEQ ID NO: 1 - DNA, 52 bp, Homo sapiens
ccagtgagcagagtgacgaggactcgagctcaagcttttttttttttttttt

SEQ ID NO: 2 - DNA, 23 bp, Homo sapiens
aagcccggtgcctgactagctag

SEQ ID NO: 3 - DNA, 22 bp, Homo sapiens
gaatatgtctccaggtccagag

SEQ ID NO: 4 - DNA, 23 bp, Homo sapiens
ccagtgagcagagtgacgaggac

SEQ ID NO: 5 - DNA, 18 bp, Homo sapiens
ctagctagggagctcgtc

SEQ ID NO: 6 - DNA, 23 bp, Homo sapiens
ccagagtcttcagagatcaagtc

SEQ ID NO: 7 - DNA, 18 bp, Homo sapiens
gaggactcgagctcaagc

SEQ ID NO: 8 - DNA, 20 bp, Homo sapiens
ctgtaaaacgacggccagtc

SEQ ID NO: 9 - DNA, 149 bp, Homo sapiens
  misc_feature (1)...(149): n = A,T,C or G
tttgctttgattctgagaaataatatgtgaaacaagaacaaagacgggttggaanagggcaagangaaagggggggatggaangaaaccctgcagccaccaacacaataaacacaataaactgtatcctgaccacctcaaaaaaaaaaa

SEQ ID NO: 10 - DNA, 202 bp, Homo sapiens
  misc_feature (1)...(202): n = A,T,C or G
actgaggggtttataaacagatttcagtccaacnaaaggtaacatttcacttgttgcctttccagtttcaagcaccaactcaccagcaaaaattttaccgaaaaccttagggccaataaatgtgaatgttggaccccaaatgatnatgaccacaccgcaaaaaattgccanttcaagaagtgtnctgattgggaatccatat

SEQ ID NO: 11 - DNA, 113 bp, Homo sapiens
  misc_feature (1)...(113): n = A,T,C or G
tggtcaccctgctacnggattccngaaattatntggcgtgaatcgggcccccttcccctgcttcataactgcatgcagaatattaaaattgagctttgatcagaaaaaaaaaa

SEQ ID NO: 12 - DNA, 216 bp, Homo sapiens
  misc_feature (1)...(216): n = A,T,C or G
acgttcagcactactgtaacgggacaccgtctgatcgcgctgtagcttgcanatctnncntccntncntctcttttnnaaagacctgcttcgacctccgtatggnntnaaacaccnatttccagaaatgctgngactnctnntactagtgtccaccantacttcctctattcttcctnccactantactactaatnctgaggatataaggaaaact

SEQ ID NO: 13 - DNA, 125 bp, Homo sapiens
gtgtgagctctctgcttgctgctccagtcgctgtgcttgcctgctgtggtgcctccctaccagggcagactcttgtgcttttggaaccataagccaaataaacccttccttccataaaaaaaaaa

SEQ ID NO: 14 - DNA, 134 bp, Homo sapiens
aggtgtggagctctctgcttagctgctccagtccgctgtgctttgcctgctgtggtgcctccctaccaggacagactcttgttgcttttggaaaccataaagccaaataaacccttccttccataaaaaaaaaa

SEQ ID NO: 15 - DNA, 125 bp, Homo sapiens
gtgtgactctctgcttgctgctccagtcgctgtgcttgcctgctgtggtgcctccctaccaggaacaaactcttgtgcttttggaaccataagccaaataaacccttccttccataaaaaaaaaa

SEQ ID NO: 16 - DNA, 124 bp, Homo sapiens
  misc_feature (1)...(124): n = A,T,C or G
tgtgagctctctgcttgctgctccagtcgctgtgcttgcctgctgtggtgcctccctaccaggacanactcttgtgcttttggaaccataagccaaataaacccttccttccataaaaaaaaaa

SEQ ID NO: 17 - DNA, 218 bp, Homo sapiens
  misc_feature (1)...(218): n = A,T,C or G
caaaggaaccactgtttngaantattttgaaggctcanccaccnaagctttagggacagggtattttatcacagcaacaaaaatgaaaccnaaacaactccacaataaaattcttgantttcttggggccaaaaaaataactcgatnanataaagacactggccaagcntgacctccaaantttggcccttgcataaaggaaaaaattaattccttca

SEQ ID NO: 18 - DNA, 130 bp, Homo sapiens
ggaggtagtgagctctctgcttgctgctccagtcgctgtgcttgcctgctgtggtgcctccctaccaggacagactcttgtgcttttggaaccataagccaaataaacccttccttccataaaaaaaaaa

SEQ ID NO: 19 - DNA, 132 bp, Homo sapiens
  misc_feature (1)...(132): n = A,T,C or G
ggctgtagttgagctctctgcatgctgggtncagnagctgtgcttgcctgctgtggtgcctccctaccaggacagactcttgtgcttttggaaccataagccaaataaacccttccttccataaaaaaaaaa

SEQ ID NO: 20 - DNA, 118 bp, Homo sapiens
  misc_feature (1)...(118): n = A,T,C or G
ctctctgcttgctgctccantcgctgtgcttgcctgctgtggtgcctccctaccaggccaaactcttgtgcttttggaaccataagccaaataaacccttccttccataaaaaaaaaa

SEQ ID NO: 21 - DNA, 128 bp, Homo sapiens
aggtgtgagctctctagcttgctgctccagtcgctgtgcttgcctgctgtggtgcctccctaccaggacaaactcttgtgcttttggaaccataagccaaataaacccttccttccataaaaaaaaaa

SEQ ID NO: 22 - DNA, 151 bp, Homo sapiens
  misc_feature (1)...(151): n = A,T,C or G
ggggtagcgccagaaaccgtnagtcntntataatntagacaaccctggggttntcgccatctcacctctcancnaaaaattcagggttanancctccaggatacacagctgatctccagcanntgggcnagttctagtgaaaaaaataaaa

SEQ ID NO: 23 - DNA, 125 bp, Homo sapiens
  misc_feature (1)...(125): n = A,T,C or G
tgtgagctctctgcttgctgctccantcgctgtgcttgcctgctgtggtgcctccctaccaggaacaaactcttgtgcttttggaaccataanccaaataaacccttccttccataaaaaaaaaa

SEQ ID NO: 24 - DNA, 152 bp, Homo sapiens
  misc_feature (1)...(152): n = A,T,C or G
gtccatctcatcaccctcaggatcnccatctgaccacngcaggcccagtggaagccanccttcctacgcccagtnagatgaccctggaaacagantgatgccaacctgaatatgtcaacttctggtgtgatntgaatgaaaatatatcttgt

SEQ ID NO: 25 - DNA, 151 bp, Homo sapiens
gctgacctgttgtcagggttggagcttccccgctcatctttctgcccgcccactgctggaacctgccgctttgctgttccgaagccatcacgtgatcaccctgctactggacttcaagattatttggcgggaatttggggccctcccgctt

SEQ ID NO: 26 - DNA, 121 bp, Homo sapiens
  misc_feature (1)...(121): n = A,T,C or G
agtattggatacaatgcgactactcgatctcttcaggttcctgctgccagcctcccccaccgngatggactataccctagcattccagtcaaaataaagctaacttgcccaaaaaaaaaaa

SEQ ID NO: 27 - DNA, 138 bp, Homo sapiens
gaactgagtgacaactgccctgaaattctgcccctgccgagagtctgaacctgtcttcctgagagattcctgaataaactgccagcctggcagcctggaatgactccaggcaccaagagtggaactggcgacttactg

SEQ ID NO: 28 - DNA, 130 bp, Homo sapiens
ttaggtgtgagctctctgcttgctgctccagtcgctgtgcttgcctgctgtggtgcctccctaccaggacacgactcttgtgcttttggaaccataagccaaataaacccttccttccataaaaaaaaaa

SEQ ID NO: 29 - DNA, 126 bp, Homo sapiens
ggtgtgagctctctgcttgctgctccagtcgctgtgcttgcctgctgtggtgcctccctaccaggacagactcttgtgcttttggaaccataagccaaataaacccttccttccataaaaaaaaaa

SEQ ID NO: 30 - DNA, 126 bp, Homo sapiens; identical to SEQ ID NO: 29

SEQ ID NO: 31 - DNA, 126 bp, Homo sapiens; identical to SEQ ID NO: 29

SEQ ID NO: 32 - DNA, 127 bp, Homo sapiens
aggtgtgagctctctgcttgctgctccagtcgctgtgcttgcctgctgtggtgcctccctaccaggacagactcttgtgcttttggaaccataagccaaataaacccttccttccataaaaaaaaaa

SEQ ID NO: 33 - DNA, 123 bp, Homo sapiens
  misc_feature (1)...(123): n = A,T,C or G
gagctctctgcttgctgctccagtccgctgtgcttgcctgctgtggtgcctccctaccaggacangactctngtgcttttggaaccataagccaaataaacccttccttccataaaaaaaaaa

SEQ ID NO: 34 - DNA, 119 bp, Homo sapiens
  misc_feature (1)...(119): n = A,T,C or G
gtgtgagctgtctgcttgctgntccagtcgntgcgctggcctgctgtggtgcctaccctaccaggacagactcttgngcttttggaaccatnagccaaanaaacccttccttccataaa

SEQ ID NO: 35 - DNA, 136 bp, Homo sapiens
  misc_feature (1)...(136): n = A,T,C or G
gctttgaattctgaganagaagagtgtgaaacaagatngcaaagatcgggttggaagagggcangaggaangggggggatggaaggaaaccctgcagccaccancacaataaacacaataaactgtatcctgacca

SEQ ID NO: 36 - DNA, 128 bp, Homo sapiens
aggtgtgagctctctgcttgctgctccagtcgctgtgcttgcctggctgtggtgcctccctaccaggacagactcttgtgcttttggaaccataagccaaataaacccttccttccataaaaaaaaaa

SEQ ID NO: 37 - DNA, 126 bp, Homo sapiens; identical to SEQ ID NO: 29

SEQ ID NO: 38 - DNA, 135 bp, Homo sapiens
gctttgaattctgagaaagaagagtgtgaaacaagaagcaaagatcgggttggaagagggcaagaggaaagggggggatggaaggaaaccctgcagccaccaacacaataaacacaataaactgtatcctgacca

SEQ ID NO: 39 - DNA, 119 bp, Homo sapiens
gaattggatacaatgcgactaccgatctcttcaggttcctgctgccagcctcccccaccgtgatggactataccctagcattccagtcaaaataaagctaacttgcccaaaaaaaaaaa

SEQ ID NO: 40 - DNA, 126 bp, Homo sapiens; identical to SEQ ID NO: 29

SEQ ID NO: 41 - DNA, 126 bp, Homo sapiens; identical to SEQ ID NO: 29

SEQ ID NO: 42 - DNA, 116 bp, Homo sapiens
  misc_feature (1)...(116): n = A,T,C or G
attggtacaatgcgactaccgatctcttcaggntcctgctgccagcctcccccaccgtgatggactataccctagcattccagtcaaaataaagctaacttgcccaaaaaaaaaaa

SEQ ID NO: 43 - DNA, 120 bp, Homo sapiens
gatattggatacaatgcgactaccgatctcttcaggttcctgctgccagcctcccccaccgtgatggactataccctagcattccagtcaaaataaagctaacttgcccaaaaaaaaaaa

SEQ ID NO: 44 - DNA, 123 bp, Homo sapiens
  misc_feature (1)...(123): n = A,T,C or G
gtgagctctctgcttgctgctccagtcgctgngcttgcctgctgtggtgcctccctaccaggacagactcttgtgcttttggaaccataagccaaataaacccttccttccataaaaaaaaaa

SEQ ID NO: 45 - DNA, 149 bp, Homo sapiens
cctctatcagcctcagatacctctaccactgaggcccagtgaagccagccttcctacgcccagtgagatgaccctggaaacagactgatgccaacctgaatatatgaacttctggtgtgatgtgaatgaaaatatatcttgttcactga

SEQ ID NO: 46 - DNA, 126 bp, Homo sapiens; identical to SEQ ID NO: 29

SEQ ID NO: 47 - DNA, 123 bp, Homo sapiens
gtaactctctgcttgctgctccagtcgctgtgcttgctgctgtgggtgctccctaccagggaacagaatcttgtgcttttggaaccataagccaaataaacccttccttccataaaaaaaaaa

SEQ ID NO: 48 - DNA, 124 bp, Homo sapiens
gtaactctctcgcttgctgctccagtcgctgtgcttgcctgctgtggtgcctccctaccagggacagactcttgtgcttttggaaccataagccaaataaacccttccttccataaaaaaaaaa

SEQ ID NO: 49 - DNA, 144 bp, Homo sapiens
ttaaattctggagaaagaagatttgaacaagaacaaagacgggttggaagaaggcaagaggaaagggggggatggaaggaaaccctgcagccaccaacacaataaacacaataaactgtatcctgaccacctcaaaaaaaaaaa

SEQ ID NO: 50 - DNA, 118 bp, Homo sapiens
  misc_feature (1)...(118): n = A,T,C or G
ctcttgctttgctgctcccagttcgctgtgcttgnctgctgtggtgcctccctaccaggacagactcttgtgcttttggaacataagccaaataaaccttccttccataaaaaaaaaa

SEQ ID NO: 51 - DNA, 252 bp, Homo sapiens
  misc_feature (1)...(252): n = A,T,C or G
tggatatgcctgagatctgccnctgccgagatctgaactgtcttcctgagaatcctgaataaatgccagcctggcagcctggaatgacccaggcaccaagagtgganctggcgacttactgctaacggctctggcggactantgctaacaatgtggcaacaaaacatcaanaacctggcatggcacgggatggcttccccctntataagcacanactgctagtanacattgagccttgaacagggaaaagaa

SEQ ID NO: 52 - DNA, 124 bp, Homo sapiens
tgtgactctctgcttgctgctccagtcgctgtgcttgcctgctgtgggtgcctccctaccaggacagactcttgtgcttttgggaacataagccaaataaacccttccttccataaaaaaaaaa

SEQ ID NO: 53 - DNA, 124 bp, Homo sapiens
  misc_feature (1)...(124): n = A,T,C or G
ttgactctctgcttgctgctccantcnctgtgcttgcctgctgtgggtgcctccctaccaggaacagaatcttgtgcttttgggaaccataagccaaataaacccttccttccataaggaaaaa

SEQ ID NO: 54 - DNA, 111 bp, Homo sapiens
  misc_feature (1)...(111): n = A,T,C or G
tcaatgcgactaccgatctcttcagggttcctgctgncagcctccnccaccgtgatggactataccctancattccagtcaaaataaagctaacttgcccaaaaaaaaaaa

SEQ ID NO: 55 - DNA, 125 bp, Homo sapiens
gtgtgactctctgcttgctgctccagtcgctgtgcttgcctgctgtggtgcctccctaccagggacagactcttgtgcttttggaaccataagccaaataaacccttccttccataaaaaaaaaa

SEQ ID NO: 56 - DNA, 129 bp, Homo sapiens
ttgttgacctctgcttgctgctccagtcgctgtgcttgcctgctgtgggtgcctccctaccagggaacagaactcttgtgcttttgggaaccataagccaaataaacccttccttccataaaaaaaaaa

SEQ ID NO: 57 - DNA, 111 bp, Homo sapiens
tacaatgcgactaccgatctcttcaggttcctgctgccagcctcccccaccgtgatggactataccctagcattccagtcaaaataaagctaacttgcccaaaaaaaaaaa

SEQ ID NO: 58 - DNA, 125 bp, Homo sapiens
gtgtgagctctctgcttgctgctccagtcgctgtgcttgcctgctgtggtgcctccctaccaggacagactcttgtgcttttggaaccataagccaaataaacccttccttccataaaaaaaaaa

SEQ ID NO: 59 - DNA, 127 bp, Homo sapiens; identical to SEQ ID NO: 32

SEQ ID NO: 60 - DNA, 127 bp, Homo sapiens; identical to SEQ ID NO: 32

SEQ ID NO: 61 - DNA, 133 bp, Homo sapiens
tgcaggtgtgagctctctgcttgctgctccagtcgctgtgcttgcctgctgtggtgcctccctaccaggacagactcttgtgcttttggaaccataagccaaataaacccttccttccataagcaaaaaaaaa

SEQ ID NO: 62 - DNA, 127 bp, Homo sapiens; identical to SEQ ID NO: 32

SEQ ID NO: 63 - DNA, 125 bp, Homo sapiens; identical to SEQ ID NO: 58

SEQ ID NO: 64 - DNA, 153 bp, Homo sapiens
aggctgaagaggagaatcccagattgccttcactcacaagatctggcagccagagccccgagtcccccaagcccagtgagcagttcaaatataaaaccgcacataacaagaaaagtgaagcaccatgaaactcttgtttgattaaaaaaaaaa

SEQ ID NO: 65 - DNA, 153 bp, Homo sapiens; identical to SEQ ID NO: 64

SEQ ID NO: 66 - DNA, 154 bp, Homo sapiens
gacctctcatcagcctcagatcaccatctaccactgaggcccagtgaagcccgccttcctacgcccagtgagatgaccctggaaacagactgatgccaacctgaatatatgaacttctggtgtgatgtgaatgaaaatatatcttgttcactga

SEQ ID NO: 67 - DNA, 153 bp, Homo sapiens; identical to SEQ ID NO: 64

SEQ ID NO: 68 - DNA, 120 bp, Homo sapiens; identical to SEQ ID NO: 43

SEQ ID NO: 69 - DNA, 116 bp, Homo sapiens
aagagtgtgaaacaagaagcaaagatcgggttggaagagggcaagaggaaagggggggatggaaggaaaccctgcagccaccaacacaataaacacaataaactgtatcctgacca

SEQ ID NO: 70 - DNA, 115 bp, Homo sapiens
tggatacaatgcgactaccgatctcttcaggttcctgctgccagcctcccccaccgtgatggactataccctagcattccagtcaaaataaagctaacttgcccaaaaaaaaaaa

SEQ ID NO: 71 - DNA, 104 bp, Homo sapiens
ctccagtcgctgtgcttgcctgctgtggtgcctccctaccaggacagactcttgtgcttttggaaccataagccaaataaacccttccttccataaaaaaaaaa

SEQ ID NO: 72 - DNA, 117 bp, Homo sapiens
atctccttgctgctccagtccgctgtgcttgcctgctgtggtgcctccctaccaggacagactcttgtgcttttggaaccataagccaaataaacccttccttccataaaaaaaaaa

SEQ ID NO: 73 - DNA, 129 bp, Homo sapiens
  misc_feature (1)...(129): n = A,T,C or G
gaaccgtgatttgatctncttgctgctccagtcgctgtgcttgcctgctgtggtgcctccctaccaggacagactcttgtgcttttggaaccataagccaaataaacccttccttccataaaaaaaaaa

SEQ ID NO: 74 - DNA, 117 bp, Homo sapiens
  misc_feature (1)...(117): n = A,T,C or G
ggtgtgagctctctgctngctgctccagtcgntgtgctngcctgctgnggngcctccctaccaggacagactcttgtgcttttggaaccataagcnaaataaacccttccttccata

SEQ ID NO: 75 - DNA, 126 bp, Homo sapiens; identical to SEQ ID NO: 29

SEQ ID NO: 76 - DNA, 119 bp, Homo sapiens; identical to SEQ ID NO: 39

SEQ ID NO: 77 - DNA, 126 bp, Homo sapiens
  misc_feature (1)...(126): n = A,T,C or G
cgtgtgagctctctgcttgctgctccagtcgctgtgcttgcctgctgtggtgcctccctaccaggacagactcttgtgcttttggaaccataagccanntaaacccttccttccataaaaaaaaaa

SEQ ID NO: 78 - DNA, 102 bp, Homo sapiens
ttgaggtcatgtcccagtgtattggccttggatcctgacgcggctgcggctgctattcatcttgttgttgtcaaatttcatttaactgcaaattaaaaaaaa

SEQ ID NO: 79 - DNA, 150 bp, Homo sapiens
tctctatcagcctcagatcacctctaccactgaggcccagtgaagccagccttcctacgcccagtgagatgaccctggaaacagactgatgccaacctgaatatatgaacttctggtgtgatgtgaatgaaaatatatcttgttcactga

SEQ ID NO: 80 - DNA, 126 bp, Homo sapiens
gtgtgagctctctgcttgctgctccagtcgctgtgcttgcctgctgtgggtgcctccctaccaggacagactcttgtgcttttggaaccataagccaaataaacccttccttccataaaaaaaaaa

SEQ ID NO: 81 - DNA, 123 bp, Homo sapiens
cctagaattggatacaatgcgactaccgatctcttcaggttcctgctgccagcctcccccaccgtgatggactataccctagcattccagtcaaaataaagctaacttgcccaaaaaaaaaaa

SEQ ID NO: 82 - DNA, 126 bp, Homo sapiens; identical to SEQ ID NO: 29

SEQ ID NO: 83 - DNA, 136 bp, Homo sapiens
  misc_feature (1)...(136): n = A,T,C or G
ggagcctaatgaggacaagctgtacatgantgatggnagatggcnnanaaatggnggnnctgnagccctgngggagcccanangagtgtgagttccacatgctggacacattanagagtttatgtatacatagaaa

SEQ ID NO: 84 - DNA, 116 bp, Homo sapiens
cgtgagctctctgcttgctgctccagtcgctgtgcttgcctgctgtggtgcctccctaccaggacagactcttgtgcttttggaaccataagccaaataaacccttccttccataa

SEQ ID NO: 85 - DNA, 151 bp, Homo sapiens
gacctctctcagcctcagatcacctctaccctgaggcccagtgaagccagccttcctacgcccagtgagatgaccctggaaacagactgatgccaacctgaatatatgaacttctggtgtgatgtgaatgaaaatatatcttgttcactga

SEQ ID NO: 86 - DNA, 126 bp, Homo sapiens; identical to SEQ ID NO: 29

SEQ ID NO: 87 - DNA, 116 bp, Homo sapiens
  misc_feature (1)...(116): n = A,T,C or G
tctgcttgctgctccagtcnctgtgcttgnctgctgnggtgcctncctaccaggacagactcttgngcttttggaaccatacggccaaataaanccttccttccataaaaaaaaaa

SEQ ID NO: 88 - DNA, 127 bp, Homo sapiens
  misc_feature (1)...(127): n = A,T,C or G
ggtagtgagctctctgcttgctgctccagtcgctgtgcttgcctgctgtggngcctccctaccaggacagactcttgtgcttttggaaccataagccaaataannccttccttccataaaaaaaaaa

SEQ ID NO: 89 - DNA, 113 bp, Homo sapiens
  misc_feature (1)...(113): n = A,T,C or G
gagctctatgcttgctgctccagtcgctgngctngcctgctgtggtgcctccctaccaggacagactcttgtgcttttggaaccataagccanatnaacccttccttccataa

SEQ ID NO: 90 - DNA, 129 bp, Homo sapiens
  misc_feature (1)...(129): n = A,T,C or G
aaggcgcgagctctatgctngctgctccagtcgctgtgcttgcctgctgtggtgcctccctaccangacagactcttgtgcttttggaaccataagccaaatnaacccttccttccataagaaaaaaaa

SEQ ID NO: 91 - DNA, 113 bp, Homo sapiens
  misc_feature (1)...(113): n = A,T,C or G
tgcttgctgctccagtcgctgtgcttgcctgctgtggtgcctccctaccaggacagactcttgngcttttggaaccataagccaaatnaacccttccttccataaaaaaaaaa

SEQ ID NO: 92 - DNA, 208 bp, Homo sapiens
  misc_feature (1)...(208): n = A,T,C or G
agcctggactggcattgnataccctgatcttnatcaatgcgnnttntgctggactgacgnntaatgacgnnccgnctntanntggagcctaatgagacaagctgtactgaagatggaagaggcagagaaatggcggngctgaagccctgtgggagcccagaagagtgtgagttccacatgctggacacattaaagagtttatgtatac

SEQ ID NO: 93 - DNA, 123 bp, Homo sapiens
gtgagctctctgcttgctgctccagtcgctgtgcttgcctgctgtggtgcctccctaccaggacagactcttgtgcttttggaaccataagccaaataaacccttccttccataaaaaaaaaa

SEQ ID NO: 94 - DNA, 122 bp, Homo sapiens
  misc_feature (1)...(122): n = A,T,C or G
gagctctctgcttgctgctccagaacgctgngcttgcctgctgtggtgcctccctaccaggacagactcttgtgcttttggaaccataagccaaataaacccttccttccataaaaaaaaaa

SEQ ID NO: 95 - DNA, 106 bp, Homo sapiens
  misc_feature (1)...(106): n = A,T,C or G
tgcttgctgctccagntcgctgtgcttgcctgctgtggtgcctccctaccaggacagactcttgtgcttttggaaccataagccaaataaacccttccttccataa

SEQ ID NO: 96 - DNA, 119 bp, Homo sapiens
  misc_feature (1)...(119): n = A,T,C or G
ggcgtgagctctctgctngctgctccagtacgctgggcttgcctgctgnggtgcctncctancaggacagactcttgtgcttttggaaccatangccaaataaacccttccttccataa

SEQ ID NO: 97 - DNA, 127 bp, Homo sapiens
ggcgtgagctctctgcttgctgctccagttcgctgtgcttgcctgctgtggtgcctccctaccaggacagactcttgtgcttttggaaccataagccaaataaacccttccttccataaaaaaaaaa

SEQ ID NO: 98 - DNA, 126 bp, Homo sapiens; identical to SEQ ID NO: 29

SEQ ID NO: 99 - DNA, 150 bp, Homo sapiens
ctctatcagcctcagatcaccatctaccactgaggcccagtgaagccagccttcctacgcccagtgagatgaccctggaaacagactgatgccaacctgaatatatgaacttctggtgtgatgtgaatgaaaatatatcttgttcactga

SEQ ID NO: 100 - DNA, 126 bp, Homo sapiens; identical to SEQ ID NO: 29

SEQ ID NO: 101 - DNA, 135 bp, Homo sapiens; identical to SEQ ID NO: 38

SEQ ID NO: 102 - DNA, 126 bp, Homo sapiens; identical to SEQ ID NO: 29

SEQ ID NO: 103 - DNA, 120 bp, Homo sapiens; identical to SEQ ID NO: 43

SEQ ID NO: 104 - DNA, 126 bp, Homo sapiens; identical to SEQ ID NO: 29

SEQ ID NO: 105 - DNA, 126 bp, Homo sapiens; identical to SEQ ID NO: 29

SEQ ID NO: 106 - DNA, 124 bp, Homo sapiens
cgtgagctctctgcttgctgctccagtcgctgtgcttgcctgctgtggtgcctccctaccaggacagactcttgtgcttttggaaccataagccaaataaacccttccttccataaaaaaaaaa

SEQ ID NO: 107 - DNA, 135 bp, Homo sapiens
gccttgaattctgagaaagaagagtgtgaaacaagaagcaaagatcgggttggaagagggcaagaggaaagggggggatggaaggaaaccctgcagccaccaacacaataaacacaataaactgtatcctgacca

SEQ ID NO: 108 - DNA, 120 bp, Homo sapiens; identical to SEQ ID NO: 43

SEQ ID NO: 109 - DNA, 102 bp, Homo sapiens
ccagtcgctgtgcttgcctgctgtggtgcctccctaccaggacagactcttgtgcttttggaaccataagccaaataaacccttccttccataaaaaaaaaa

SEQ ID NO: 110 - DNA, 134 bp, Homo sapiens
ggtgtgagctctctgcttgctgctccagtcgctgtgcttgcctgctgtggtgcctccctaccaggacagactcttgtgcttttggaaccataagccaaataaacccttccttccataagctgcaaaaaaaaaaa

SEQ ID NO: 111 - DNA, 126 bp, Homo sapiens; identical to SEQ ID NO: 29

SEQ ID NO: 112 - DNA, 150 bp, Homo sapiens
  misc_feature (1)...(150): n = A,T,C or G
gtgtcaggattgaatctggactctgctggtgtggagcacgttctgtcatgtctccagcangagggcgcattctgcattcttcagaactcaagaagctcaagngtagcagacctgagaaactgggctaccctttgaagaggagagatgcag

SEQ ID NO: 113 - DNA, 126 bp, Homo sapiens; identical to SEQ ID NO: 29

SEQ ID NO: 114 - DNA, 126 bp, Homo sapiens; identical to SEQ ID NO: 29

SEQ ID NO: 115 - DNA, 126 bp, Homo sapiens; identical to SEQ ID NO: 29

SEQ ID NO: 116 - DNA, 126 bp, Homo sapiens; identical to SEQ ID NO: 29

SEQ ID NO: 117 - DNA, 135 bp, Homo sapiens; identical to SEQ ID NO: 38

SEQ ID NO: 118 - DNA, 126 bp, Homo sapiens; identical to SEQ ID NO: 29

SEQ ID NO: 119 - DNA, 126 bp, Homo sapiens; identical to SEQ ID NO: 29

SEQ ID NO: 120 - DNA, 121 bp, Homo sapiens
  misc_feature (1)...(121): n = A,T,C or G
gagctctctgcttgctgctccagtcgctgngcttgcctgctgnggtgcctccctaccaggacagactcttgtgcttttggaaccataagccaaataaacccttccttccataaaaaaaaaa

SEQ ID NO: 121 - DNA, 151 bp, Homo sapiens
gacctctctcagcctcagatcacctctaccctgaggcccagtgaagcccgccttcctacgcccagtgagatgaccctggaaacagactgatgccaacctgaatatatgaacttctggtgtgatgtgaatgaaaatatatcttgttcactga

SEQ ID NO: 122 - DNA, 119 bp, Homo sapiens
gctctctgcttgctgctccagtcgctgtgcttgcctgctgtggtgcctccctaccaggacagactcttgtgcttttggaaccataagccaaataaacccttccttccataaaaaaaaaa

SEQ ID NO: 123 - DNA, 121 bp, Homo sapiens
  misc_feature (1)...(121): n = A,T,C or G
ggtgtgagctctctgctngctgctccagttcgctgtgcttgcctgctgtggtgcctccctaccaggacagactcttgtgcttttggaaccataagccaaataaacccttccttccataaaa

SEQ ID NO: 124 - DNA, 152 bp, Homo sapiens
gtcctctatcagcctcagatcaccatctaccctgaggcccagtgaagccagccttcctacgcccagtgagatgaccctggaaacagactgatgccaacctgaatatatgaacttctggtgtgatgtgaatgaaaatatatcttgttcactga

SEQ ID NO: 125 - DNA, 126 bp, Homo sapiens; identical to SEQ ID NO: 29

SEQ ID NO: 126 - DNA, 126 bp, Homo sapiens; identical to SEQ ID NO: 29

SEQ ID NO: 127 - DNA, 126 bp, Homo sapiens; identical to SEQ ID NO: 29

SEQ ID NO: 128 - DNA, 126 bp, Homo sapiens; identical to SEQ ID NO: 29

SEQ ID NO: 129 - DNA, 119 bp, Homo sapiens; identical to SEQ ID NO: 122

SEQ ID NO: 130 - DNA, 135 bp, Homo sapiens; identical to SEQ ID NO: 38

SEQ ID NO: 131 - DNA, 126 bp, Homo sapiens; identical to SEQ ID NO: 29

SEQ ID NO: 132 - DNA, 119 bp, Homo sapiens; identical to SEQ ID NO: 122

SEQ ID NO: 133 - DNA, 126 bp, Homo sapiens; identical to SEQ ID NO: 29

SEQ ID NO: 134 - DNA, 131 bp, Homo sapiens
  misc_feature (1)...(131): n = A,T,C or G
ttgaggtgtgagctctctgcttgctgntncagtcgctgtgcttgcctgctgtggtgcctccctaccaggacangactcttgtgcttttggaaccataagccaaataaacccttccttccataaaaaaaaaa

SEQ ID NO: 135 - DNA, 120 bp, Homo sapiens; identical to SEQ ID NO: 43

SEQ ID NO: 136 - DNA, 126 bp, Homo sapiens; identical to SEQ ID NO: 29

SEQ ID NO: 137 - DNA, 126 bp, Homo sapiens; identical to SEQ ID NO: 29

SEQ ID NO: 138 - DNA, 126 bp, Homo sapiens; identical to SEQ ID NO: 29

SEQ ID NO: 139 - DNA, 126 bp, Homo sapiens; identical to SEQ ID NO: 29

SEQ ID NO: 140 - DNA, 126 bp, Homo sapiens; identical to SEQ ID NO: 29

SEQ ID NO: 141 - DNA, 131 bp, Homo sapiens
ttaaaggtgtgagctctctgcttgctgctccagtcgctgtgcttgcctgctgtggtgcctccctaccaggacagactcttgtgcttttggaaccataagccaaataaacccttccttccataaaaaaaaaa

SEQ ID NO: 142 - DNA, 115 bp, Homo sapiens
  misc_feature (1)...(115): n = A,T,C or G
gtgagctctctgcttgctgctccagtcgctgtgctngcctgctgtggtgcctccctaccaggacagactcttgtgcttttggaaccataagccanataaacccttccttccataa

SEQ ID NO: 143 - DNA, 123 bp, Homo sapiens; identical to SEQ ID NO: 93

SEQ ID NO: 144 - DNA, 123 bp, Homo sapiens; identical to SEQ ID NO: 93

SEQ ID NO: 145 - DNA, 126 bp, Homo sapiens; identical to SEQ ID NO: 29

SEQ ID NO: 146 - DNA, 153 bp, Homo sapiens
ggctgaagaggagaatcccagattgccttcactcacaagatctggcacgccagagccccgagtcccccaagcccagtgagcagttcaaatataaaaccgcacataacaagaaaagtgaagcaccatgaaactcttgtttgattaaaaaaaaaa

SEQ ID NO: 147 - DNA, 187 bp, Homo sapiens
  misc_feature (1)...(187): n = A,T,C or G
acctgtaccctgaggcccantgaanccagtcttcctacgcccagagagatgaccctggaaacagactgatgccnacctgantatatgaacttctggtgtgatgtgaatgaaaatatatctngntcactgacanannnatgcaaanctgaatatangaacttctggtgtgatgtgaatgaaaatatat

SEQ ID NO: 148 - DNA, 126 bp, Homo sapiens; identical to SEQ ID NO: 29

SEQ ID NO: 149 - DNA, 126 bp, Homo sapiens; identical to SEQ ID NO: 29

SEQ ID NO: 150 - DNA, 126 bp, Homo sapiens; identical to SEQ ID NO: 29

SEQ ID NO: 151 - DNA, 108 bp, Homo sapiens
cgagctctctgcttgctgctccagtcgctgtgcttgcctgctgtggtgcctccctaccaggacagactcttgtgcttttggaaccataagccaaataaacccttcctt

SEQ ID NO: 152 - DNA, 137 bp, Homo sapiens
  misc_feature (1)...(137): n = A,T,C or G
gctttgaattctgagacnnangagtgtgaaacaagaagcaaagatcgggttggaagagggcanagaggaaagggggggatggaaggaaaccctgcatccaccaacacattaaacacaataaactgtatcctgaccaa

SEQ ID NO: 153 - DNA, 128 bp, Homo sapiens
aaggtgtgagctctctgcttgctgctccagtcgctgtgcttgcctgctgtggtgcctccctaccaggacagactcttgtgcttttggaaccataagccaaataaacccttccttccataaaaaaaaaa

SEQ ID NO: 154 - DNA, 135 bp, Homo sapiens
  misc_feature (1)...(135): n = A,T,C or G
gctttgaattctgagaaagaagagtgtgaaacaagaagcaaagatcgggttggaaganggcaagaggaaagggggggatggaaggaaaccctgcagccaccaacacaataaacacaataaactgtatcctgacca

SEQ ID NO: 155 - DNA, 120 bp, Homo sapiens
gctctctgcttgctgctccagtcgctgtgcttgcctgctgtggtgcctccctaccaggacacgactcttgtgcttttggaaccataagccaaataaacccttccttccataaaaaaaaaa

SEQ ID NO: 156 - DNA, 126 bp, Homo sapiens; identical to SEQ ID NO: 29

SEQ ID NO: 157 - DNA, 126 bp, Homo sapiens; identical to SEQ ID NO: 29

SEQ ID NO: 158 - DNA, 126 bp, Homo sapiens; identical to SEQ ID NO: 29

SEQ ID NO: 159 - DNA, 126 bp, Homo sapiens; identical to SEQ ID NO: 29

SEQ ID NO: 160 - DNA, 126 bp, Homo sapiens; identical to SEQ ID NO: 29

SEQ ID NO: 161 - DNA, 331 bp, Homo sapiens
  misc_feature (1)...(331): n = A,T,C or G
atgaccaagctgtcctgcaactccanagatctgnctgcctctgtctngngagtgctggaattannggaatgntncacccnnncgntgnacnnacaangangcanaacngacgtcanctacactnagctantgnanntgnatgcccnttatgctgagtgcaggccaancgnaatctggcctgncactagcntccagtntagggaggcaggaacactgagantaatcaagaaatcaaaggagtttgcagccggctacaacgtcaagtttgacatgtacagcaagatctgtgtaaatggggacgatgcccacccactgtggaaatggatgaaag

SEQ ID NO: 162 - DNA, 126 bp, Homo sapiens; identical to SEQ ID NO: 29

SEQ ID NO: 163 - DNA, 126 bp, Homo sapiens; identical to SEQ ID NO: 29

SEQ ID NO: 164 - DNA, 287 bp, Homo sapiens
  misc_feature (1)...(287): n = A,T,C or G
ggcccaacagctccanccttctgaganggcaggccattttcngacgcaggactttctgtgctcattcttgaggnanctttcaatcccttactatagctatttctagatgccctttaacattgtgaacaaatagaccgtctggtattataaaacacaaatgnacanacntntgngctttctatgctcatcctttcactcatcctcttactactttctgttccatgtgtcgnaccttaggctcaccccaggncaaccttattgcctcactcacaaaagttattataata

SEQ ID NO: 165 - DNA, 112 bp, Homo sapiens
  misc_feature (1)...(112): n = A,T,C or G
ggtgtgagctctctgnttgctgctccagtcgctgtgcttgcctgctgtggtgcctccctaccaggacagactcttgtgcttttggaaccataagccaaataaacccttcctt

SEQ ID NO: 166 - DNA, 126 bp, Homo sapiens; identical to SEQ ID NO: 29

SEQ ID NO: 167 - DNA, 120 bp, Homo sapiens
gaattggatacaatgcgactaccgatctcttcagggttcctgctgccagcctcccccaccgtgatggactataccctagcattccagtcaaaataaagctaacttgcccaaaaaaaaaaa

SEQ ID NO: 168 - DNA, 126 bp, Homo sapiens; identical to SEQ ID NO: 29

SEQ ID NO: 169 - DNA, 126 bp, Homo sapiens; identical to SEQ ID NO: 29

SEQ ID NO: 170 - DNA, 126 bp, Homo sapiens; identical to SEQ ID NO: 29

SEQ ID NO: 171 - DNA, 150 bp, Homo sapiens
cctctcatcagcctcagatcacctctaccctgaggcccagtgaagccagccttcctacgcccagtgagatgaccctggaaacagactgatgccaacctgaatatatgaacttctggtgtgatgtgaatgaaaatatatcttgttcactga

SEQ ID NO: 172 - DNA, 126 bp, Homo sapiens
ggcgtgagctctctgcttgctgctccagtcgctgtgcttgcctgctgtggtgcctccctaccaggacagactcttgtgcttttggaaccataagccaaataaacccttccttccataaaaaaaaaa

SEQ ID NO: 173 - DNA, 125 bp, Homo sapiens; identical to SEQ ID NO: 58

SEQ ID NO: 174 - DNA, 101 bp, Homo sapiens
  misc_feature (1)...(101): n = A,T,C or G
tctgcttgctgctccagncgctgtgctngcctgctgtggngcctccctaccaggacagactcttgggcttttggaaccataagccaaataaacccttcctt

SEQ ID NO: 175 - DNA, 127 bp, Homo sapiens; identical to SEQ ID NO: 32

SEQ ID NO: 176 - DNA, 127 bp, Homo sapiens; identical to SEQ ID NO: 32

SEQ ID NO: 177 - DNA, 126 bp, Homo sapiens; identical to SEQ ID NO: 29

SEQ ID NO: 178 - DNA, 126 bp, Homo sapiens; identical to SEQ ID NO: 172

SEQ ID NO: 179 - DNA, 134 bp, Homo sapiens
  misc_feature (1)...(134): n = A,T,C or G
ttgagacacaagagtgtgaaacnagaagcaaagatcgggttggaagagggcaagaggaaagggggggatggaaggaaaccctgcagccaccaacacantanacacaataaactgtatcctgaccacctgaaaaa

SEQ ID NO: 180 - DNA, 149 bp, Homo sapiens
  misc_feature (1)...(149): n = A,T,C or G
gacctctatcagcctcgatccctctaccctgaggcccantgaagccagccttcctacgcccagtgagatgaccctggaaacagactgatgccaacctgaatatatgaacttctggtgtgatgtgaatgaaaatatatcttgttcactga

SEQ ID NO: 181 - DNA, 126 bp, Homo sapiens; identical to SEQ ID NO: 29

SEQ ID NO: 182 - DNA, 123 bp, Homo sapiens
  misc_feature (1)...(123): n = A,T,C or G
gtgagctctctgcttgctgctccagtcgctgtgcttgcctgctgnggtgcctccctaccaggacagactcttgtgcttttggaaccataagccaaataaacccttncttccataaaaaaaaaa

SEQ ID NO: 183 - DNA, 126 bp, Homo sapiens; identical to SEQ ID NO: 29

SEQ ID NO: 184 - DNA, 126 bp, Homo sapiens; identical to SEQ ID NO: 29

SEQ ID NO: 185 - DNA, 126 bp, Homo sapiens; identical to SEQ ID NO: 29

SEQ ID NO: 186 - DNA, 134 bp, Homo sapiens
ctttgaattctgagaaagaagagtgtgaaacaagaagcaaagatcgggttggaagagggcaagaggaaagggggggatggaaggaaaccctgcagccaccaacacaataaacacaataaactgtatcctgacca

SEQ ID NO: 187 - DNA, 119 bp, Homo sapiens; identical to SEQ ID NO: 122

SEQ ID NO: 188 - DNA, 126 bp, Homo sapiens; identical to SEQ ID NO: 29

SEQ ID NO: 189 - DNA, 121 bp, Homo sapiens
gagctctctgcttgctgctccagtcgctgtgcttgcctgctgtggtgcctccctaccaggacagactcttgtgcttttggaaccataagccaaataaacccttccttccataaaaaaaaaa

SEQ ID NO: 190 - DNA, 139 bp, Homo sapiens
tgagaaagaagagtgtgaaacaagaagcaaagatcgggttggaagagggcaagaggaaagggggggatggaaggaaaccctgcagccaccaacacaataaacacaataaactgtatcctgaccacctcaaaaaaaaaaa

SEQ ID NO: 191 - DNA, 150 bp, Homo sapiens
agctttgattctgagaaagaagagtgtgaaacaagaagcaaagatcgggttggaagagggcaagaggaaagggggggatggaaggaaaccctgcagccaccaacacaataaacacaataaactgtatcctgaccacctcaaaaaaaaaaa

SEQ ID NO: 192 - DNA, 108 bp, Homo sapiens
gctgatccagtcgctgggcttgcctgctgtggtgcctccctaccaggacagactcttgtgcttttggaaccataagccaaataaacccttccttccataaaaaaaaaa

SEQ ID NO: 193 - DNA, 140 bp, Homo sapiens
ttatagctttgaattctgagaaagaagagtgtgaaacaagaagcaaagatcgggttggaagagggcaagaggaaagggggggatggaaggaaaccctgcagccaccaacacaataaacacaataaactgtatcctgacca

SEQ ID NO: 194 - DNA, 128 bp, Homo sapiens; identical to SEQ ID NO: 153

SEQ ID NO: 195 - DNA, 121 bp, Homo sapiens
gatattggatacaatgcgactacccgatctcttcaggttcctgctgccagcctcccccaccgtgatggactataccctagcattccagtcaaaataaagctaacttgcccaaaaaaaaaaa

SEQ ID NO: 196 - DNA, 127 bp, Homo sapiens
ggtgtgagctctctgcttgctgctccagtccgctgtgcttgcctgctgtggtgcctccctaccaggacagactcttgtgcttttggaaccataagccaaataaacccttccttccataaaaaaaaaa

SEQ ID NO: 197 - DNA, 126 bp, Homo sapiens; identical to SEQ ID NO: 29

SEQ ID NO: 198 - DNA, 150 bp, Homo sapiens
gctttgaattctgagaaagaagagtgtgaaacaagaagcaaagatcgggttggaagagggcaagaggaaagggggggatggaaggaaaccctgcagccaccaacacaataaacacaataaactgtatcctgaccacctcaaaaaaaaaaa

SEQ ID NO: 199 - DNA, 128 bp, Homo sapiens; identical to SEQ ID NO: 153

SEQ ID NO: 200 - DNA, 123 bp, Homo sapiens; identical to SEQ ID NO: 93

SEQ ID NO: 201 - DNA, 126 bp, Homo sapiens; identical to SEQ ID NO: 29

SEQ ID NO: 202 - DNA, 126 bp, Homo sapiens; identical to SEQ ID NO: 29

SEQ ID NO: 203 - DNA, 128 bp, Homo sapiens; identical to SEQ ID NO: 153

SEQ ID NO: 204 - DNA, 154 bp, Homo sapiens
aaggctgaagaggagaatcccagattgccttcactcacaagatctggcagccagagccccgagtcccccaagcccagtgagcagttcaaatataaaaccgcacataacaagaaaagtgaagcaccatgaaactcttgtttgattaaaaaaaaaa

SEQ ID NO: 205 - DNA, 135 bp, Homo sapiens; identical to SEQ ID NO: 38

SEQ ID NO: 206 - DNA, 126 bp, Homo sapiens; identical to SEQ ID NO: 29

SEQ ID NO: 207 - DNA, 126 bp, Homo sapiens; identical to SEQ ID NO: 29

SEQ ID NO: 208 - DNA, 126 bp, Homo sapiens; identical to SEQ ID NO: 29

SEQ ID NO: 209 - DNA, 145 bp, Homo sapiens
gaggagaatcccagattgccttcactcacaagatctggcagccagagccccgagtcccccaagcccagtgagcagttcaaatataaaaccgcacataacaagaaaagtgaagcaccatgaaactcttgtttgattaaaaaaaaaa

SEQ ID NO: 210 - DNA, 126 bp, Homo sapiens; identical to SEQ ID NO: 29

SEQ ID NO: 211 - DNA, 119 bp, Homo sapiens
ctattggatacaatgcgactaccgatctcttcaggttcctgctgccagcctcccccaccgtgatggactataccctagcattccagtcaaaataaagctaacttgcccaaaaaaaaaaa

SEQ ID NO: 212 - DNA, 134 bp, Homo sapiens; identical to SEQ ID NO: 186

SEQ ID NO: 213 - DNA, 140 bp, Homo sapiens
  misc_feature (1)...(140): n = A,T,C or G
ctcagatcacctctaccactgaggcccantgaanccagncttcctacgcccagggagatgaccctgganacaagactgatgccaacctgaatatatgaacttctggtgtgatgtgaatgaaaatatatcttgttcactga

SEQ ID NO: 214 - DNA, 152 bp, Homo sapiens
gacctctctcagcctcagatcacctctaccctgaggcccagtgaagccagccttcctacgcccagtgagatgaccctggaaacagactgatgccaacctgaatatatgaacttctggtgtgatgtgaatgaaaatatatcttgttcactgag

SEQ ID NO: 215 - DNA, 119 bp, Homo sapiens
gatttggatacaatgcgactaccgatctcttcaggttcctgctgccagcctcccccaccgtgatggactataccctagcattccagtcaaaataaagctaacttgcccaaaaaaaaaaa

SEQ ID NO: 216 - DNA, 116 bp, Homo sapiens
ttggatacaatgcgactaccgatctcttcaggttcctgctgccagcctcccccaccgtgatggactataccctagcattccagtcaaaataaagctaacttgcccaaaaaaaaaaa

SEQ ID NO: 217 - DNA, 109 bp, Homo sapiens
  misc_feature (1)...(109): n = A,T,C or G
caatgcgactaccgatctcttnaggntcctgctgcctgcctcccccaccgtgatggactataccctagcattccagtcaaaataaagctancttgcccaagaaaaaaaa

SEQ ID NO: 218 - DNA, 315 bp, Homo sapiens
  misc_feature (1)...(315): n = A,T,C or G
tggtctgagcttctgatacctcgaaagacattcacaantatgctgtgacttattggcagtataaggattccaaaagaaannactnnatatannngagcaggaagacattacatgacanctccaaaccaaccaaccaatcaatgagaaccaaccaaccaaccaaccaaccaatgagaaccaaccaatgagaaccaaccaatgagaaccaaccccaaggaacagaggaagcacaagaaggatgacaggaacattttttacttttctttctgctattgaaggcgaggcattaaagttgaagtgctattaaaaaaaaaa

SEQ ID NO: 219 - DNA, 126 bp, Homo sapiens; identical to SEQ ID NO: 29

SEQ ID NO: 220 - DNA, 127 bp, Homo sapiens; identical to SEQ ID NO: 32

SEQ ID NO: 221 - DNA, 126 bp, Homo sapiens; identical to SEQ ID NO: 29

SEQ ID NO: 222 - DNA, 122 bp, Homo sapiens
ggtgtgagctctctgcttgctgctccagtcgctgtgcttgcctgctgtggtgcctccctaccaggacagactcttgtgcttttggaaccataggccaaataaacccttccttccataaaaaa

SEQ ID NO: 223 - DNA, 127 bp, Homo sapiens
  misc_feature (1)...(127): n = A,T,C or G
ggtgtgagtttgatgccanttgctccagtcgctgtgcttgcctgctgtggtgcctccctaccaggacacgactcttgtgcttttggaaccataagccaaataaacccttccttccataaaaaaaaaa

SEQ ID NO: 224 - DNA, 127 bp, Homo sapiens
  misc_feature (1)...(127): n = A,T,C or G
aggtgtgagctctctgctngctgctccagtcgctgtgcttgcctgctgtggtgcctccctaccaggacagactcttgtgcttttggaaccataagccaaataaacccttccttccataaaaaaaaaa

SEQ ID NO: 225 - DNA, 131 bp, Homo sapiens; identical to SEQ ID NO: 141

SEQ ID NO: 226 - DNA, 150 bp, Homo sapiens
  misc_feature (1)...(150): n = A,T,C or G
ctgaagaggagaatcccagattgccttcactcacaggatctggcagncagagccccgagtcccccaagcccagtgagcagttcaaatataaaaccgcacataacaagaaaagtgaagcaccatgaaactcttgtttgattaaaaaaaaaa

SEQ ID NO: 227 - DNA, 126 bp, Homo sapiens
ggtgtgagctctctgcttgctgctccagtcgctgtgcttgcctgctgtggtgcctccctaccaggacagactctcgtgcttttggaaccataagccaaataaacccttccttccataaaaaaaaaa

SEQ ID NO: 228 - DNA, 126 bp, Homo sapiens; identical to SEQ ID NO: 29

SEQ ID NO: 229 - DNA, 121 bp, Homo sapiens
aaagaagagtgtgaaacaagaagcaaagatcgggttggaagagggcaagaggaaagggggggatggaaggaaaccctgcagccaccaacacaataaacacaataaactgtatcctgaccaa

SEQ ID NO: 230 - DNA, 130 bp, Homo sapiens
ttaaggtgtgagctctctgcttgctgctccagtcgctgtgcttgcctgctgtggtgcctccctaccaggacagactcttgtgcttttggaaccataagccaaataaacccttccttccataaaaaaaaaa

SEQ ID NO: 231 - DNA, 126 bp, Homo sapiens; identical to SEQ ID NO: 29

SEQ ID NO: 232 - DNA, 126 bp, Homo sapiens; identical to SEQ ID NO: 29

SEQ ID NO: 233 - DNA, 126 bp, Homo sapiens; identical to SEQ ID NO: 29

SEQ ID NO: 234 - DNA, 127 bp, Homo sapiens; identical to SEQ ID NO: 32

SEQ ID NO: 235 - DNA, 126 bp, Homo sapiens; identical to SEQ ID NO: 29

SEQ ID NO: 236 - DNA, 126 bp, Homo sapiens; identical to SEQ ID NO: 29

SEQ ID NO: 237 - DNA, 127 bp, Homo sapiens; identical to SEQ ID NO: 32

SEQ ID NO: 238 - DNA, 127 bp, Homo sapiens; identical to SEQ ID NO: 32

SEQ ID NO: 239 - DNA, 419 bp, Homo sapiens
  misc_feature (1)...(419): n = A,T,C or G
aggtagtggttacaangnaacatacttcaacgncatagggnaatgtaacacacgggcggnaacattcactgttctgncaaatccancgtctttgtagtcagttctgtaggtcaggtagnagttcactggtttcaaggtctgtaaaatggtaattgttgtatagtagtgcttgtctagcacgcatgtaagtcccaggttcaagcctcagcagcatagnaaacaaacaaacaaaactcaggnacataccgactcacacttggtaatcccagcattgggtaacagtaacacaggtagggattactgtgtagctggtaggccagccaggnactacatagcaaggacccctcctatccctctaaaatttctgttttaaaaaagggaattcattttattttaataagtttttattattcctttta

SEQ ID NO: 240 - DNA, 391 bp, Homo sapiens
  misc_feature (1)...(391): n = A,T,C or G
aggtgttcgtgctgcaccaaccaccacaaccacaacccactgtaatactggcagtaggnaaccannatagtgtgtcaagggaacccagtatcagtangtgggcgtaagcctcacaggtaatcaccatatcctgtttgttgcgggtagncctcgccagcttcttcactgggttccagtgtactcacaggtatccactcaccacacatgcacagtatggcgccgggggacaggggagagccacgcagggccgtaaatctccgaggcgctaatcccagccagcatatgcttaattaggcaaggtgtgttggtacttccacgcacagataattgtaaatccatgcagggagatgactggtttttgtgttctaaaatgatgaaatatacatgtttt

SEQ ID NO: 241 - DNA, 126 bp, Homo sapiens; identical to SEQ ID NO: 29

SEQ ID NO: 242 - DNA, 151 bp, Homo sapiens
gctttgaattcttgagaaagaagagtgtgaaacaagaagcaaagatcgggttggaagagggcaagaggaaagggggggatggaaggaaaccctgcagccaccaacacaataaacacaataaactgtatcctgaccacctcaaaaaaaaaaa

SEQ ID NO: 243 - DNA, 126 bp, Homo sapiens; identical to SEQ ID NO: 29

SEQ ID NO: 244 - DNA, 126 bp, Homo sapiens; identical to SEQ ID NO: 29

SEQ ID NO: 245 - DNA, 126 bp, Homo sapiens; identical to SEQ ID NO: 29

SEQ ID NO: 246 - DNA, 126 bp, Homo sapiens; identical to SEQ ID NO: 29

SEQ ID NO: 247 - DNA, 127 bp, Homo sapiens; identical to SEQ ID NO: 32

SEQ ID NO: 248 - DNA, 126 bp, Homo sapiens; identical to SEQ ID NO: 29

SEQ ID NO: 249 - DNA, 120 bp, Homo sapiens
agctctctgcttgctgctccagtcgctgtgcttgcctgctgtggtgcctccctaccaggacagactcttgtgcttttggaaccataagccaaataaacccttccttccataaaaaaaaaa

SEQ ID NO: 250 - DNA, 132 bp, Homo sapiens
tttgaagccgttagctctctgcttgctgctccagtcgctgtgcttgcctgctgtggtgcctccctaccaggacagactcttgtgcttttggaaccataagccaaataaacccttccttccataaaaaaaaaa

SEQ ID NO: 251 - DNA, 126 bp, Homo sapiens; identical to SEQ ID NO: 29

SEQ ID NO: 252 - DNA, 110 bp, Homo sapiens
  misc_feature (1)...(110): n = A,T,C or G
tgctccatacgctgtgcttgcctgctgtggtgcctccctaccaggnacagaactcttgtgcttttgggaaccataagnccaaataaacccttccttccataaaaaaaaaa

SEQ ID NO: 253 - DNA, 119 bp, Homo sapiens; identical to SEQ ID NO: 122

SEQ ID NO: 254 - DNA, 120 bp, Homo sapiens; identical to SEQ ID NO: 43

SEQ ID NO: 255 - DNA, 119 bp, Homo sapiens
  misc_feature (1)...(119): n = A,T,C or G
gtattggatacaatgcgactaccgatctcttcaggntcctgctgccagcctcccccaccgtgatggactataccctagcattccagtcaaaataaagctaacttgcccaaaaaaaaaaa

SEQ ID NO: 256 - DNA, 112 bp, Homo sapiens
  misc_feature (1)...(112): n = A,T,C or G
gatattggatacaatgcgactaccgatctcttcaggntcctgctgccagcctcccccaccgtgatggactataccctagcattccagtcaaaataaagctaacttgcccaaa

SEQ ID NO: 257 - DNA, 112 bp, Homo sapiens
  misc_feature (1)...(112): n = A,T,C or G
gatattggatacaatgcgactaccgatctcttcaggttcctgntgccagnctcccccaccgtgatggactataccctagcattccaggcaanataaagctaacttgcccaaa

SEQ ID NO: 258 - DNA, 120 bp, Homo sapiens; identical to SEQ ID NO: 43

SEQ ID NO: 259 - DNA, 122 bp, Homo sapiens
agaattggatacaatgcgactaccgatctcttcagggttcctgctgccagcctcccccaccgtgatgggactataccctagcattccagtcaaaataaagctaacttgcccaaaaaaaaaaa

SEQ ID NO: 260 - DNA, 138 bp, Homo sapiens
agctttgattctgagaaagaagagtgtgaaacaagaagcaaagatcgggttggaagagggcaagaggaaagggggggatggaaggaaaccctgcagccaccaacacaataaacacaataaactgtatcctgaccacct

SEQ ID NO: 261 - DNA, 126 bp, Homo sapiens; identical to SEQ ID NO: 29

SEQ ID NO: 262 - DNA, 135 bp, Homo sapiens; identical to SEQ ID NO: 38

SEQ ID NO: 263 - DNA, 126 bp, Homo sapiens; identical to SEQ ID NO: 29

SEQ ID NO: 264 - DNA, 138 bp, Homo sapiens
gctttgaattctgagaaagaagagtgtgaaacaagaagcaaagatcgggttggaagagggcaagaggaaagggggggatggaaggaaaccctgcagccaccaacacaataaacacaataaactgtatcctgaccacct

SEQ ID NO: 265 - DNA, 126 bp, Homo sapiens; identical to SEQ ID NO: 29

SEQ ID NO: 266 - DNA, 126 bp, Homo sapiens; identical to SEQ ID NO: 29

SEQ ID NO: 267 - DNA, 129 bp, Homo sapiens
aaaggtgtgagctctctgcttgctgctccagtcgctgtgcttgcctgctgtggtgcctccctaccaggacagactcttgtgcttttggaaccataagccaaataaacccttccttccataaaaaaaaaa

SEQ ID NO: 268 - DNA, 126 bp, Homo sapiens; identical to SEQ ID NO: 29

SEQ ID NO: 269 - DNA, 109 bp, Homo sapiens
  misc_feature (1)...(109): n = A,T,C or G
tctctgcttgctgctccagtcgctgtgcttgcctgctgtggtgcctccctaccaggacagactcttgtgcttttggaaccataagccanataaacccttccttccataa

SEQ ID NO: 270 - DNA, 126 bp, Homo sapiens; identical to SEQ ID NO: 29

SEQ ID NO: 271 - DNA, 101 bp, Homo sapiens
gctctctgcttgctgctccagtcgctgtgcttgcctgctgtggtgcctccctaccaggacagactcttgtgcttttggaaccataagccaaataaaccctt

SEQ ID NO: 272 - DNA, 152 bp, Homo sapiens
aggctgaagaggagaatcccagattgccttcctcacaagatctggcagccagagccccgagtcccccaagcccagtgagcagttcaaatataaaaccgcacataacaagaaaagtgaagcaccatgaaactcttgtttgattaaaaaaaaaa

SEQ ID NO: 273 - DNA, 127 bp, Homo sapiens; identical to SEQ ID NO: 32

SEQ ID NO: 274 - DNA, 127 bp, Homo sapiens
tgagaaagaagagtgtgaaacaagaagcaaagatcgggttggaagagggcaagaggaaagggggggatggaaggaaaccctgcagccaccaacacaataaacacaataaactgtatcctgaccacct

SEQ ID NO: 275 - DNA, 126 bp, Homo sapiens; identical to SEQ ID NO: 29

SEQ ID NO: 276 - DNA, 151 bp, Homo sapiens
gctgaagaggagaatcccagattgccttcactcacaagatctggcagccagagccccgagtcccccaagcccagtgagcagttcaaatataaaaccgcacataacaagaaaagtgaagcaccatgaaactcttgtttgattaaaaaaaaaa

SEQ ID NO: 277 - DNA, 125 bp, Homo sapiens
gttgaagaattggatacaatgcgactaccgatctcttcaggttcctgctgccagcctcccccaccgtgatggactataccctagcattccagtcaaaataaagctaacttgcccaaaaaaaaaaa

SEQ ID NO: 278 - DNA, 126 bp, Homo sapiens; identical to SEQ ID NO: 29

SEQ ID NO: 279 - DNA, 126 bp, Homo sapiens; identical to SEQ ID NO: 29

SEQ ID NO: 280 - DNA, 126 bp, Homo sapiens; identical to SEQ ID NO: 29

SEQ ID NO: 281 - DNA, 127 bp, Homo sapiens; identical to SEQ ID NO: 32

SEQ ID NO: 282 - DNA, 544 bp, Homo sapiens
  misc_feature (1)...(544): n = A,T,C or G
tttattgaagacgctntttcccccattgngtattnttggctagntttgtcaaagatcaanggtccgtaagtaactgtcnaaaaannttctgnggnttnnacttttntntgngatctgaaanaatgnnatcaacantaccattgagggccttactanctacacnttgcaggaccttatcaggaactggatattnttnggngnattgnantgtangnctgcagncacggctataccagtgatacantaaagagngccctgatgtttcccacnggggccttcttcctgcgccatctaagaanccgtgtatgcannagccctccatctcctttggccctgaatgagagcacccngattattctgctaanantgcttnngtgaatgccatntccctcacatctggagnngctaaaggccttgancacatggtcactgcccaacgagtggnagaaaagctngcatttgcnataatggaacctgcatgcatgtnagnccttgaannggagactgnctaaatgccntcccaagccaaggaacttgcttaggg

SEQ ID NO: 283 - DNA, 127 bp, Homo sapiens; identical to SEQ ID NO: 196

SEQ ID NO: 284 - DNA, 120 bp, Homo sapiens; identical to SEQ ID NO: 43

SEQ ID NO: 285 - DNA, 129 bp, Homo sapiens; identical to SEQ ID NO: 267

SEQ ID NO: 286 - DNA, 138 bp, Homo sapiens
  misc_feature (1)...(138): n = A,T,C or G
gaagtgtgtccagctggctggaanctgcttgctgctccagtcgctgtgcttgcctgctgtggtgcctccctaccaggacagactcttgtgcttttggaaccataagccaaataaacccttccttccataaaaaaaaaa

SEQ ID NO: 287 - DNA, 177 bp, Homo sapiens
  misc_feature (1)...(177): n = A,T,C or G
cttggctgaagaggaaataaaaactgagcaggaggtggnggagggaanggatatctctactcgctccaaanatcctgtctctacagagaaaacggccccgaaacggaagttccccagccctccacattcctccaatggccattcgccccaagactcatccacgagccccattaaaaa

SEQ ID NO: 288 - DNA, 157 bp, Homo sapiens
  misc_feature (1)...(157): n = A,T,C or G
attataagcacaccgcagagaattgccaattcaggaagtgttctgattgggaatccatatacccctgcacccgcaatggtcactcagactcacatagctgaggctgctggctgggttcccagtgatcgaanccgagctagagaatttatagactctg

SEQ ID NO: 289 - DNA, 182 bp, Homo sapiens
cttggctgaagaggaaataaaaactgagcaggaggtggtggagggaatggatatctctactcgctccaaagatcctgtctctacagagaaaacggccccgaaacggaagttccccagccctccacattcctccaatggccattcgccccaagactcatccacgagccccattaaaaaaaaaa

SEQ ID NO: 290 - DNA, 182 bp, Homo sapiens; identical to SEQ ID NO: 289

SEQ ID NO: 291 - DNA, 207 bp, Homo sapiens
  misc_feature (1)...(207): n = A,T,C or G
gtaacatttcacttgttgcctttccagtttcaagcaccaactcaccaacaaagattttaccgaaaaccttagggccaataaatgtgaatgtgggaccccaaaggatnttaancccncngaaaanaatggccantnnagnangggtcngnatgggnattcnttttncccnggaacccgcaatggtcactttaagaactcacatagctt

SEQ ID NO: 292 - DNA, 161 bp, Homo sapiens
  misc_feature (1)...(161): n = A,T,C or G
ctgagcaggaggtggtggagggaatggatatctctactcgctccaaagatcctgtntctacagagaaaacggccccgaaacggaagttncccagccctccacattcctncaatggccattcgccccaagactcatccacgagccccattaaaaaaaagaaa

SEQ ID NO: 293 - DNA, 182 bp, Homo sapiens
  misc_feature (1)...(182): n = A,T,C or G
cttggctgaagaggaaataaaaactgancaggangnggtggagggaatggatatctctactcgctccaaagatcctgtctctacagagaaaacggccccgaaacggaagttccccagccctccacattcctccaatggccattcgccccaagactcatccacgagccccattaaaaaaaaaa

SEQ ID NO: 294 - DNA, 131 bp, Homo sapiens
  misc_feature (1)...(131): n = A,T,C or G
atctaatcaaagacaaacttaaagagaaagacagagagagagagaaaanagaagcntaaagtantgagtgagatcacngaaagaacntggagatgtnaagattttactgaaaagtgggaaggagaaaccaa

SEQ ID NO: 295 - DNA, 127 bp, Homo sapiens; identical to SEQ ID NO: 196

SEQ ID NO: 296 - DNA, 140 bp, Homo sapiens
acacaggagacagaggtgtgagctctctgcttgctgctccagtcgctgtgcttgcctgctgtggtgcctccctaccaggacagactcttgtgcttttggaaccataagccaaataaacccttccttccataaaaaaaaaa

SEQ ID NO: 297 - DNA, 119 bp, Homo sapiens
atattggatacaatgcgactaccgatctcttcaggttcctgctgccagcctcccccaccgtgatggactataccctagcattccagtcaaaataaagctaacttgcccaaaaaaaaaaa

SEQ ID NO: 298 - DNA, 126 bp, Homo sapiens; identical to SEQ ID NO: 29

SEQ ID NO: 299 - DNA, 126 bp, Homo sapiens; identical to SEQ ID NO: 29

SEQ ID NO: 300 - DNA, 119 bp, Homo sapiens; identical to SEQ ID NO: 122

SEQ ID NO: 301 - DNA, 132 bp, Homo sapiens
tttgattctgagaaagaagagtgtgaaacaagaagcaaagatcgggttggaagagggcaagaggaaagggggggatggaaggaaaccctgcagccaccaacacaataaacacaataaactgtatcctgacca

SEQ ID NO: 302 - DNA, 150 bp, Homo sapiens; identical to SEQ ID NO: 198

SEQ ID NO: 303 - DNA, 136 bp, Homo sapiens
agctttgaattctgagaaagaagagtgtgaaacaagaagcaaagatcgggttggaagagggcaagaggaaagggggggatggaaggaaaccctgcagccaccaacacaataaacacaataaactgtatcctgacca

SEQ ID NO: 304 - DNA, 182 bp, Homo sapiens
  misc_feature (1)...(182): n = A,T,C or G
gagcggcctccacccaaacnactnactagggaagctatgcnanantatntaaangaacgaggggatnnaacngtgctcattcttcatgcaaangntgcacagaagtcttacggnantgaaaaacgatttttttgccctcctccttgtgtgtatcttatgggcannggttggaaaaaaaaaaa

SEQ ID NO: 305 - DNA, 135 bp, Homo sapiens
  misc_feature (1)...(135): n = A,T,C or G
ggatataaaatactagctnnaaagatnctgtctctacagagaaaacggccccgaaacggaagttccccagccctccacattcctccaatggccattcgccccaagactcatccacgagccccattaaaaaaaaaa

SEQ ID NO: 306 - DNA, 182 bp, Homo sapiens; identical to SEQ ID NO: 289

SEQ ID NO: 307 - DNA, 111 bp, Homo sapiens
atcctgtctctacagagaaaacggccccgaaacggaagttccccagccctccacattcctccaatggccattcgccccaagactcatccacgagccccattaaaaaaaaaa

SEQ ID NO: 308 - DNA, 141 bp, Homo sapiens
attataagcacaccgcagagaattgccaattcaggaagtgttctgattgggaatccatatacccctgcacccgcaatggtcactcagactcacatagctgaggctgctggctgggttcccagtaaacgaagcaaaaaaaaa

SEQ ID NO: 309 - DNA, 182 bp, Homo sapiens; identical to SEQ ID NO: 289

SEQ ID NO: 310 - DNA, 162 bp, Homo sapiens
aaactgagcaggaggtggtggagggaatggatatctctactcgctccaaagatcctgtctctacagagaaaacggccccgaaacggaagttccccagccctccacattcctccaatggccattcgccccaagactcatccacgagccccattaaaaaaaaaa

SEQ ID NO: 311 - DNA, 113 bp, Homo sapiens
atcctgtctctacagagaaaacggccccgaaacggaagttccccagccctccacattcctccaatggccattcgccccaagactcatccacgagccccattaaaaagaaaaaa

SEQ ID NO: 312 - DNA, 182 bp, Homo sapiens; identical to SEQ ID NO: 289

SEQ ID NO: 313 - DNA, 182 bp, Homo sapiens; identical to SEQ ID NO: 289

SEQ ID NO: 314 - DNA, 402 bp, Homo sapiens
  misc_feature (1)...(402): n = A,T,C or G
tttcaagcaccaactcaccaacaaagattttaccgaaaaccttagggccaataaatgtgaatgttggaccccaaatggtaagaaaattattaaatttcagaattgacacttttctcaggcaagactaatttatagataattatgctgaagatgtttgatcaaatattctatttaattttagttatctcatttaccctaaataaaagttttggttttatctcagtataattaagtattaatttatattaataaatgtttttgtgttcttatgtttaattttaacatttcaatctgtgggttctgaatgtgtaatattaaggnttttctccccttacgaggcctttcttaacttttgggggntaattaacttgaaatctattgnattctaccagtcttacaact

SEQ ID NO: 315 - DNA, 235 bp, Homo sapiens
  misc_feature (1)...(235): n = A,T,C or G
gtaacatttcacttgttgcctttccagtttcaagcaccaactcaccaacaaagattttaccgaaaaccttagggccantaaatgtgaatgttggaccccaaatgattataancacaccgcagagaattgccaattcaggaagtgttctgattgggaatccatatacccctgcacccgcaatggtcactcagactcacatagctgaggctgctggctgggttcccagtgatcgaag

SEQ ID NO: 316 - DNA, 102 bp, Homo sapiens
  misc_feature (1)...(102): n = A,T,C or G
cgccaggacggagcgattctcanggnggaaggancncgccnacaggncctgactgcttacagacatgtccccctcaataaaattgcagttgaaatggaaaaa

SEQ ID NO: 317 - DNA, 178 bp, Homo sapiens
  misc_feature (1)...(178): n = A,T,C or G
agaagtcagaagaggtcagtcagctnnnctggtggagctggagctacaagcaactgggaaaactactctgcatatnactctncaagaagcagtnacgagtgatcttccacccctctgcctctgctctgcannaacagcangngctcttaacctgttaatcatggagcattttcactag

SEQ ID NO: 318 - DNA, 182 bp, Homo sapiens; identical to SEQ ID NO: 289

SEQ ID NO: 319 - DNA, 125 bp, Homo sapiens; identical to SEQ ID NO: 58

SEQ ID NO: 320 - DNA, 141 bp, Homo sapiens
  misc_feature (1)...(141): n = A,T,C or G
tagggaagctatgcgaaattatttaaaagaacgaggggattaaacagtgctcattcttnatgcaaaagttgcacagaagtcttacggaaatgaaaaacgatttttttgcnctcctccttgtgtgnatcttaaaggcagata

SEQ ID NO: 321 - DNA, 182 bp, Homo sapiens; identical to SEQ ID NO: 289

SEQ ID NO: 322 - DNA, 151 bp, Homo sapiens
  misc_feature (1)...(151): n = A,T,C or G
gctgaagaggagaatcccagattgccttcactcacaagatctggcagccagagccccgagtcccccaagcccagtgagcagannnaatatgannccgnacatancaagaaaagtgaagcaccatgaaactcttgtttgattaaaaaaaaaa

SEQ ID NO: 323 - DNA, 357 bp, Homo sapiens
  misc_feature (1)...(357): n = A,T,C or G
atgcatgtatacttccttgtacctntcgctcgactgnacnntgncctnaccggaatgaagggtggcatgaagggaagggaaggcatcttgactgatanctgnactnntgcacagcaagatggaggnangctggccttnatgtaacctnncgnntcngggngatnngngncttnccttnnncggattcaccggtggcccggtttgcacgtgcanantggtgacgaggctccctaaagcagcctcgaccatccacagacagcctcacgtttttctcctactttttccttatgcttttaaatggcagactcgccgggcgtggnggcncacgcccttttattcccatcactttgggaaggc

SEQ ID NO: 324 - DNA, 152 bp, Homo sapiens
  misc_feature (1)...(152): n = A,T,C or G
ctttgaattcatgagaaagaagagtgtgaaacaagaagcaaanatcgggttggaagagggcnagaggaaagggggggatggaaggaaaccctgcagccaccaacacaataancacaatatactgtatcctgaccacctcaaaaaaaaaacca

SEQ ID NO: 325 - DNA, 182 bp, Homo sapiens; identical to SEQ ID NO: 289

SEQ ID NO: 326 - DNA, 111 bp, Homo sapiens
  misc_feature (1)...(111): n = A,T,C or G
atcctgtctctacagagaaaacggccccgaaacggaagttccccagncctccacattcctccaatggccattcgcccnaagactcatccacgagccccattaaaaaaaaaa

SEQ ID NO: 327 - DNA, 182 bp, Homo sapiens; identical to SEQ ID NO: 289

SEQ ID NO: 328 - DNA, 182 bp, Homo sapiens; identical to SEQ ID NO: 289

SEQ ID NO: 329 - DNA, 182 bp, Homo sapiens; identical to SEQ ID NO: 289

SEQ ID NO: 330 - DNA, 135 bp, Homo sapiens
ctttgaattcatgagaaagaagagtgtgaaacaagaagcaaagatcgggttggaagagggcaagaggaaagggggggatggaaggaaaccctgcagccaccaacacaataaacacaataaactgtatcctgacca

SEQ ID NO: 331 - DNA, 182 bp, Homo sapiens; identical to SEQ ID NO: 289

SEQ ID NO: 332 - DNA, 182 bp, Homo sapiens
  misc_feature (1)...(182): n = A,T,C or G
cttggctgaagaggaaataaaaactgagcaggaggtggtggagggaatggatatctctactcgctccaaagatcctgtctctacagagaaaacggccccgaaacggaagttccccagccctccacattcctccaatggccattcgccccaagactcatncacgagccccattaaaaaaaaaa

SEQ ID NO: 333 - DNA, 182 bp, Homo sapiens; identical to SEQ ID NO: 289

SEQ ID NO: 334 - DNA, 182 bp, Homo sapiens; identical to SEQ ID NO: 289

SEQ ID NO: 335 - DNA, 198 bp, Homo sapiens
  misc_feature (1)...(198): n = A,T,C or G
gtaggggggaactgctcgtggctgangaggaaataaaaactgagcaggaggtggtggagggaatggatatctctactcgctccagagatcctgtctctacagagaaaacggccccgaaacggaagttccccagccctccacattcctccaatggccattcgccccaagactcatccacgagccccattaaaaaaaaaa

SEQ ID NO: 336 - DNA, 350 bp, Homo sapiens
  misc_feature (1)...(350): n = A,T,C or G
atgagctcacagtacctgcactttaccccagtagccctgaagtgtgggccccgtaccctctgtacccagcggagttagcgcctgctcttcctcctcctgccgctttcacctaccccgcttcactgcatgcccagaggcnctgtatacatgcctaggnnnncacncctgacnnntgganactnctncagcacatgnatgatngcgtcnctgggaatgngcctgncacagatcaacctactgcagaccancnaagggagcttnngagacagaatgtattannaaccnactaccttatnccttttgcaaanganaactnttctttganaatntttgagagatttcaataaaaa

SEQ ID NO: 337 - DNA, 138 bp, Homo sapiens
tgaacccgttttaagtcacgaactgagatcctgtctctacagagaaaacggccccgaaacggaagttccccagccctccacattcctccaatggccattcgccccaagactcatccacgagccccattaaaaaaaaaa

SEQ ID NO: 338 - DNA, 109 bp, Homo sapiens
atcctgtctctacagagaaaacggccccgaaacggaagttccccagccctccacattcctccaatggccattcgccccaagactcatccacgagccccaaaaaaaaaaa

SEQ ID NO: 339 - DNA, 148 bp, Homo sapiens
  misc_feature (1)...(148): n = A,T,C or G
cttggctgaagaggaaataaaaactgagcaggaggtggtggagggaatggatatctctactcgctccaaagatcctgtctctacaganaaaacngccccgaaacggaagttccccagccctccacattcctccaatggccattcgccc

SEQ ID NO: 340 - DNA, 153 bp, Homo sapiens
ggaagctatgcgaaattatttaaaagaacgaggggatcaaacagtgctcattcttcatgcaaaagttgcacagaagtcttacggaaatgaaaaacgatttttttgccctcctccttgtgtgtatcttatgggcagtggttggaaaaaaaaaaa

SEQ ID NO: 341 - DNA, 112 bp, Homo sapiens
gatcctgtctctacagagaaaacggccccgaaacggaagttccccagccctccacattcctccaatggccattcgccccaagactcatccacgagccccattaaaaaaaaaa

SEQ ID NO: 342 - DNA, 111 bp, Homo sapiens; identical to SEQ ID NO: 307

SEQ ID NO: 343 - DNA, 182 bp, Homo sapiens; identical to SEQ ID NO: 289

SEQ ID NO: 344 - DNA, 103 bp, Homo sapiens
ctgagaaggttggagttttaatgattcaggcggctctggcggccaggctgggcgatatggtccgcacctagactgttgagctgggggtagaggaaaaaaaaaa

SEQ ID NO: 345 - DNA, 171 bp, Homo sapiens
aggaaataaaaactgagcaggaggtggtggagggaatggatatctctactcgctccaaagatcctgtctctacagagaaaacggccccgaaacggaagttccccagccctccacattcctccaatggccattcgccccaagactcatccacgagccccattaaaaaaaaaa

SEQ ID NO: 346 - DNA, 237 bp, Homo sapiens
  misc_feature (1)...(237): n = A,T,C or G
cttgcaagcaccaactcaccnacactttattctagcgaaaaccttatggccaataaaatgtgaatgntgtaccccttcactgattataatgcacaccngcacagaattgccaattcttgagagtgttctgattgggaatccatatacccctgcacccgcaatggtcactcagactcacatagctgaggctgctggctgggttcccagtaaacgaagcaaaaaaggagaaaaaaaaaa

SEQ ID NO: 347 - DNA, 105 bp, Homo sapiens
gactgagaaggttggagttttaatgattcaggcggctctggcggccaggctgggcgatatggtccgcacctagactgttgagctgggggtagaggaaaaaaaaaa

SEQ ID NO: 348 - DNA, 360 bp, Homo sapiens
  misc_feature (1)...(360): n = A,T,C or G
ctgagatgagctccagtacctgcactttaccccantagccctgaagngtgggccccgtaccctctgtacccagcggagttagcgcctgctcttcctcctcctgccggtttcacctaccccgcttcactgcatgcccagagnttctnttatacaggcntnncccnncacacctganntttgganacttcttcancaaattanannngtctctnggaatgtgtttgggncctattaacctactgcanaccancnaagggagctncngntgntgaatttattagcaaccccctcccttccccttttgcaaaaaaaaacnttttttgataatgtttngagaaanntcaaataaaaaattttaat

SEQ ID NO: 349 - DNA, 121 bp, Homo sapiens
gactgaggtgatgaagtctcgatcactagacgggagatgctgccaagtgccccagacgggatcaagactccaatgacaaccataagattccctaaagctaagacactgcagaaaaaaaaaa

SEQ ID NO: 350 - DNA, 106 bp, Homo sapiens
gaggtgatgaagtctcgatcactagacgggagatgctgccaagtgccccagacgggatcaagactccaatgacaaccataagattccctaaagctaagacactgca

SEQ ID NO: 351 - DNA, 105 bp, Homo sapiens; identical to SEQ ID NO: 347

SEQ ID NO: 352 - DNA, 105 bp, Homo sapiens; identical to SEQ ID NO: 347

SEQ ID NO: 353 - DNA, 189 bp, Homo sapiens
gactgagcttggctgaagaggaaataaaaactgagcaggaggtggtggagggaatggatatctctactcgctccaaagatcctgtctctacagagaaaacggccccgaaacggaagttccccagccctccacattcctccaatggccattcgccccaagactcatccacgagccccattaaaaaaaaaa

SEQ ID NO: 354 - DNA, 105 bp, Homo sapiens
aactgagaaggttggagttttaatgattcaggcggctctggcggccaggctgggcgatatggtccgcacctagactgttgagctgggggtagaggaaaaaaaaaa

SEQ ID NO: 355 - DNA, 117 bp, Homo sapiens
  misc_feature (1)...(117): n = A,T,C or G
cagagaattgccaattcaggaagtgttctgattgggaatccatatacccctgcacccgcaatggtcactcanactcacatagctgaggctgctggctgggttcccagtaaacgaagc

SEQ ID NO: 356 - DNA, 189 bp, Homo sapiens; identical to SEQ ID NO: 353

SEQ ID NO: 357 - DNA, 116 bp, Homo sapiens
agactgaggtgatgaagtctcgatcactagacgggagatgctgccaagtgccccagacgggatcaagactccaatgacaaccataagattccctaaagctaagacactgcagaaaa

SEQ ID NO: 358 - DNA, 120 bp, Homo sapiens
  misc_feature (1)...(120): n = A,T,C or G
agaactgagatcctgtctctacagagaaaacggccccgaaacggaagttncccagccctccacattcctccaatggccattcgccccaagactcatccacgagccccattaaaaaaaaaa

SEQ ID NO: 359 - DNA, 106 bp, Homo sapiens
agactgagaaggttggagttttaatgattcaggcggctctggcggccaggctgggcgatatggtccgcacctagactgttgagctgggggtagaggaaaaaaaaaa

SEQ ID NO: 360 - DNA, 182 bp, Homo sapiens; identical to SEQ ID NO: 289

SEQ ID NO: 361 - DNA, 202 bp, Homo sapiens
  misc_feature (1)...(202): n = A,T,C or G
gacgtctggggagctcctgcattaagtnaagaactgagcttggctgaagaggaaataaaaactgagcaggaggtggtggagggaatggatatctctactcgctccaaagatcctgtctctacagagaaaacggccccgaaacggaagttccccagccctccacattcctccaatggccattcgccccaagactcatccacga

SEQ ID NO: 362 - DNA, 121 bp, Homo sapiens; identical to SEQ ID NO: 349

SEQ ID NO: 363 - DNA, 175 bp, Homo sapiens
gactgagataaaatcaaagacaaaattaaagagaaagacaaagagagagagaaaaagaagcataaagtaatgagtgagatcaagaaagaaaatggagatgtaaagattttactgaaaagtgggaaggagaaaccaaaaacaaatatagaagacttacaaattaaaaaagtaaaaa

SEQ ID NO: 364 - DNA, 107 bp, Homo sapiens
gaggtgatcgaagtctcgatcactagacgggagatgctgccaagtgccccagacgggatcaagactccaatgacaaccataagattccctaaagctaagacactgca

SEQ ID NO: 365 - DNA, 223 bp, Homo sapiens
  misc_feature (1)...(223): n = A,T,C or G
gttccaaaagtggcaggaagccccctggaccttcaccctcggcctgctgtccctccactacggcctaagagcttggagtggggangancatggnggcatngttgccaanggtctggacacangcatgcnggaaaatggaccttncttaagactnaagctgtgcacacagcttgtgacacganaacacttttccacacctatanttggggtgttgcctaaatat

SEQ ID NO: 366 - DNA, 181 bp, Homo sapiens
ctgagataaaatcaaagacaaaattaaagagaaagacaaagagagagagaaaaagaagcataaagtaatgagtgagatcaagaaagaaaatggagatgtaaagattttactgaaaagtgggaaggagaaaccaaaaacaaatatagaagacttacaaattaaaaaagtaaagaagaaaaaa

SEQ ID NO: 367 - DNA, 121 bp, Homo sapiens
actgaggtgatgaagtctcgatcactagacgggagatgctgccaagtgccccagacgggatcaagactccaatgacaaccataagattccctaaagctaagacactgcagaagaaaaaaaa

SEQ ID NO: 368 - DNA, 106 bp, Homo sapiens
ctgaggtgatgaagtctcgatcactagacgggagatgctgccaagtgccccagacgggatcaagactccaatgacaaccataagattccctaaagctaagacactg

SEQ ID NO: 369 - DNA, 119 bp, Homo sapiens
gactgaggtgaagaagtctcgatcactagacgggagatgctgccaagtgccccagacgggatcaagactccaatgacaaccataagattccctaaagctaagacactgaaaaaaaaaaa

SEQ ID NO: 370 - DNA, 111 bp, Homo sapiens
agactgaggtgatgaagtctcgatcactagacgggaggtgctgccaagtgccccagacgggatcaagactccaatgacaaccataagattccctaaagctaagacactgca

SEQ ID NO: 371 - DNA, 135 bp, Homo sapiens
  misc_feature (1)...(135): n = A,T,C or G
cttccgccagtaacgnctgaggtgaggaagnctagatcactananggganatgntgccacgtgncccagacgggatcaagactccaatgacaacgcataagattccctaaagctaagacactgcaaaaaaaaaaa

SEQ ID NO: 372 - DNA, 117 bp, Homo sapiens
gaggtgatcgaagtctcgatcactagacgggagatgctgccaagtgccccagacgggatcaagactccaatgacaaccataagattccctaaagctaagacactgcaaaaaaaaaaa

SEQ ID NO: 373 - DNA, 110 bp, Homo sapiens
tgaagtctcgatcactagacgggagatgctgccaagtgccccagacgggatcaagactccaatgacaaccataagattccctaaagctaagacactgcagaaaaaaaaaa

SEQ ID NO: 374 - DNA, 119 bp, Homo sapiens
gactgaggtgatgaagtctcgatcctagacgggagatgctgccaagtgccccagacgggatcaagactccaatgacaaccataagattccctaaagctaagacactgcaaaaaaaaaaa

SEQ ID NO: 375 - DNA, 121 bp, Homo sapiens
  misc_feature (1)...(121): n = A,T,C or G
gactgaggtgatgaagnctcgatcactagacgggagatgctgccaagtgccccagacgggatcaagactccaatgacaaccataagattccctaaagctaagacactgcagaaaaaaaaaa

SEQ ID NO: 376 - DNA, 119 bp, Homo sapiens; identical to SEQ ID NO: 374

SEQ ID NO: 377 - DNA, 118 bp, Homo sapiens
  misc_feature (1)...(118): n = A,T,C or G
ctgaggtgatgaagtctcgatnactagacgggagatgctgccaagngccccagacgggatcaagactccaatgacaaccataagattccctaaagctaagacactgcaaaaaaaaaaa

SEQ ID NO: 378 - DNA, 118 bp, Homo sapiens
  misc_feature (1)...(118): n = A,T,C or G
ctgaggtgatgaagtctcgatcactagacgggagatgctgccaagtgccccagacgggatcaagactccnatggcaaccataagattccctaaagctaagacactgcaaaaaaaaaaa

SEQ ID NO: 379 - DNA, 120 bp, Homo sapiens
cctgaggtgatgaagtctcgatcactagacgggagatgctgccaagtgccccagacgggatcaagactccaatgacaaccataagattccctaaagctaagacactgcagaaaaaaaaaa

SEQ ID NO: 380 - DNA, 107 bp, Homo sapiens
ctgaggtgatgaagtctggatcctagacgggagatgctgccaagtgccccagacgggatcaagactccaatgacaaccataagattccctaaagctaagacactgca

SEQ ID NO: 381 - DNA, 121 bp, Homo sapiens; identical to SEQ ID NO: 349

SEQ ID NO: 382 - DNA, 121 bp, Homo sapiens
gactgaggtgatgaagtctcgatcactagacgggagatgctgccaagtgccccagacgggatcaaagactccaatgacaaccataagattccctaaagctaagacactgcaaaaaaaaaaa

SEQ ID NO: 383 - DNA, 138 bp, Homo sapiens
  misc_feature (1)...(138): n = A,T,C or G
tgcgagattatttaaaaaaacgagggggatcaaacagngctcattcttcatgcncaagttgcacagaagtcttacnggaantgaaaaacagatttttttgccctcctccttgcgtggatcttatgggcagtggttgta

SEQ ID NO: 384 - DNA, 121 bp, Homo sapiens; identical to SEQ ID NO: 349

SEQ ID NO: 385 - DNA, 130 bp, Homo sapiens
actgaggcacgactgcggggatgaagtctcgatcctagacgggagatgctgccaagtgccccagacgggatcaagactccaatgacaaccataagattccctaaagctaagacactgcagaaaaaaaaaa

SEQ ID NO: 386 - DNA, 117 bp, Homo sapiens
gaggtgatgaagtctcgatcactagacgggagatgctgccaagtgccccagacgagatcaagactccaatgacaaccataagattccctaaagctaagacactgcagaaaaaaaaaa

SEQ ID NO: 387 - DNA, 116 bp, Homo sapiens
  misc_feature (1)...(116): n = A,T,C or G
gaggtgatgaagtctngatcactagacgggagatgctgccaagtgccccagacgggatcaagactccaatgacaaccataagattccctaaagctaagacactgcaaaaaaaaaaa

SEQ ID NO: 388 - DNA, 121 bp, Homo sapiens
  misc_feature (1)...(121): n = A,T,C or G
gacctgtggtgttgaagtctcgacactagacgggtagnatgctgtcaagtgccccagacgggatcaagactccaatgacaaccntaagattccctaaagctaagacactgcaaaaaaaata

SEQ ID NO: 389 - DNA, 118 bp, Homo sapiens
ctgaggtgatgaagtctcgatcactagacgggagatgctgccaagtgccccagacgggatcaagactccaatgacaaccataagattccctaaagctaagacattgcaaaaaaaaaaa

SEQ ID NO: 390 - DNA, 105 bp, Homo sapiens
gaggtgatgaagtctcgatcactagacgggagatgctgccaagtgccccagacgggatcaagactccaatgacaaccataagattccctaaagctaagacactgc

SEQ ID NO: 391 - DNA, 123 bp, Homo sapiens
  misc_feature (1)...(123): n = A,T,C or G
ctagactgagtgatgaagtctcgatcactagacgggagatgctgccaagtgccccagacgggatcaagactccantgacnaccataagattccctaaagctaagacactgcagaaaaaaaaaa

SEQ ID NO: 392 - DNA, 182 bp, Homo sapiens
  misc_feature (1)...(182): n = A,T,C or G
gcttgctgaagagganataaaaactgagcaggaggtggtggagggaatggatatctctactcgctccaaagatcctgtctctacagagaaaacggccccgaaacggaagttccccagccctccacattcctccaatggccattcgccccaagactcatccacgagccccattaaaaaaaaaa

SEQ ID NO: 393 - DNA, 120 bp, Homo sapiens
  misc_feature (1)...(120): n = A,T,C or G
agactgagtgatgaagtctcgatnctagacgggagatgctgccaagtgtcccagacgggatcaagactccaatgacaaccataagattccctaaagctaagacactgcagaaaaaaaaaa

SEQ ID NO: 394 - DNA, 118 bp, Homo sapiens
  misc_feature (1)...(118): n = A,T,C or G
tagaggagtgtgaagtctcgatcctagacgggagatgctgccaagtgccccagacggtatcaagactccaatgacaaccataagattccntaaagctaagacactgcaaaaaaaaaaa

SEQ ID NO: 395 - DNA, 112 bp, Homo sapiens
  misc_feature (1)...(112): n = A,T,C or G
gtgatgaagtctcgatcctagacgggagangctgccaagtgccccagacgggatcaagactccaatgacanccataagattccctaaagctaagacactgcaaaaaaaaaaa

SEQ ID NO: 396 - DNA, 118 bp, Homo sapiens
  misc_feature (1)...(118): n = A,T,C or G
ctgaggtgatgaagtctcgatcctagacgggagatgctgccaagngccccngacgggatcaagactccnntgannancatnagattccctnaagntaagacactgcagaaaaaaaaaa

SEQ ID NO: 397 - DNA, 122 bp, Homo sapiens
agactgaggtgatgaagtctcgatcctagacgggagatgctgccaagtgccccagacgggatcaagactccaatgacaaccataagattccctaaggctaagacactgcaggaaaaaaaaaa

SEQ ID NO: 398 - DNA, 116 bp, Homo sapiens
gaggtgatgaagtctcgatcactagacgggagatgctgccaagtgccccagacgggatcaagactccaatgacaaccataagattccctaaagctaagacactgcaaaaaaaaaaa

SEQ ID NO: 399 - DNA, 102 bp, Homo sapiens
ctgaggtgatgaagtctcgatcactagacgggagatgctgccaagtgccccagacgggatcaagactccaatgacaaccataagattccctaaagctaagac

SEQ ID NO: 400 - DNA, 102 bp, Homo sapiens
tgagaaggttggagttttaatgattcaggcggctctggcggccaggctgggcgatatggtccgcacctagactgttgagctgggggtagaggaaaaaaaaaa

SEQ ID NO: 401 - DNA, 133 bp, Homo sapiens
gaggtgcgcgtgtcgcccgaggccgccgggacggagcgattctcacggaggaaggagcaccgccaacagggcctgactgcgtacagacatgtccccctcaataaaattgcagttgaaatggaaaaaaaagaaa

SEQ ID NO: 402 - DNA, 117 bp, Homo sapiens
gaggtgatgaagtctcgatcactagacgggagatgctgccaagtgccccagacgggatcaagactccaatgacaaccataagattccctaaagctaagacactgcagaaaaaaaaaa

SEQ ID NO: 403 - DNA, 118 bp, Homo sapiens
  misc_feature (1)...(118): n = A,T,C or G
ctgggtgatgaatctcgatcactanacgggagatgctgccaagtgccccanacgggatcnagactccaatgacaaccataagattccctaaagctaanacactgcactaaaaaaaaaa

SEQ ID NO: 404 - DNA, 122 bp, Homo sapiens
  misc_feature (1)...(122): n = A,T,C or G
acactgaggtgatgaagtctcgatcactagacgggagatgctgccaagtgccccagacgggatcaagactccaatgacnancataagattccctaaagctaagacactgcagaaaaaaaaaa

SEQ ID NO: 405 - DNA, 111 bp, Homo sapiens
agactgaggtgatgaagtctcgatcactagacgggagacgctgccaagtgccccagacgggatcaagactccaatgacaaccataagattccctaaagctaagacactgca

SEQ ID NO: 406 - DNA, 108 bp, Homo sapiens
  misc_feature (1)...(108): n = A,T,C or G
cctgaggtgatgaagtgtngatcactagacgggagatgctgccaagtgccccagacgggatcaagactccaatgacaaccataagattccctaaagctaagacactgc

SEQ ID NO: 407 - DNA, 121 bp, Homo sapiens
acactgaggtgatgaagtctcgatcctagacgggagatgctgccaagtgccccagacgggatcaagactccaatgacaaccataagattccctaaagctaagacactgcagaaaaaaaaaa

SEQ ID NO: 408 - DNA, 118 bp, Homo sapiens
ctgaggtgatgaagtctcgatcactagacgggagatgctgccaagtgccccagacgggatcaagactccaatgacaaccataagattccctaaagctaagacactgcaaaaaaaaaaa

SEQ ID NO: 409 - DNA, 121 bp, Homo sapiens
gactgaggtgatgaagtctcgatcactagacggggagatgctgccaagtgccccagacgggatcaagactccaatgacaaccataagattccctaaagctaagacactgcaaaaaaaaaaa

SEQ ID NO: 410 - DNA, 120 bp, Homo sapiens
acactgaggtgatgaagtctcgatcctagacgggagatgctgccaagtgccccagacgggatcaagactccaatgacaaccataagattccctaaagctaagacactgcaaaaaaaaaaa

SEQ ID NO: 411 - DNA, 119 bp, Homo sapiens
actgaggtgatggagtctcgatcctagacgggagatgctgccaagtgccccagacgggatcaagactccaatgacaaccataagattccctaaagctaagacactgcgaaaaaaaaaaa

SEQ ID NO: 412 - DNA, 119 bp, Homo sapiens
ctgaggtgatgaagtctcgatcactagacgggagatgctgccaagtgccccagacgggatcaagactccaatgacaaccataagattccctaaagctaagacactctgaaaaaaaaaaa

SEQ ID NO: 413 - DNA, 118 bp, Homo sapiens; identical to SEQ ID NO: 408

SEQ ID NO: 414 - DNA, 114 bp, Homo sapiens
  misc_feature (1)...(114): n = A,T,C or G
ctgaggtgatgaagtctcgatcactagacgggagatgctgccaagtgccccagacgggatcaagactccaatgacaaccataagattccctanagctaagacactgctaaaaaa

SEQ ID NO: 415 - DNA, 120 bp, Homo sapiens
cactgaggtaatgaagtctcgatcactagacgggagatgctgccaagtgccccagacgggatcaagactccaatggcaaccataagattccctaaagctaagacactgcaaaaaaaaaaa

SEQ ID NO: 416 - DNA, 190 bp, Homo sapiens
caactgagcttggctgaagaggaaataaaaactgagcaggaggtggtggagggaatggatatctctactcgctccaaagatcctgtctctacagagaaaacggccccgaaacggaagttccccagccctccacattcctccaatggccattcgccccaagactcatccacgagccccattaaaaaaaaaa

SEQ ID NO: 417 - DNA, 193 bp, Homo sapiens
gaactgagcttggctgaagaggaaataaaaactgagcaggaggtggtggagggaatggatatctctactcgctccaaagatcctgtctctacagagaaaacggccccgaaacggaagttccccagccctccacattcctccaatggccattcgccccaagactcatccacgagccccattaaaaagaaaaaga

SEQ ID NO: 418 - DNA, 122 bp, Homo sapiens
agcactgaggtgatgaagtctcgatcactagacgggagatgctgccaagtgccccagacgggatcaagactccaatgacaaccataagattccctaaagctaagacactgcaaaaaaaaaaa

SEQ ID NO: 419 - DNA, 119 bp, Homo sapiens
ctgaggtgatgaagtctcgatcactagacgggagatgctgccaagtgccccagacgggatcaaagactccaatgacaaccataagattccctaaagctaagacactgcaaaaaaaaaaa

SEQ ID NO: 420 - DNA, 117 bp, Homo sapiens
  misc_feature (1)...(117): n = A,T,C or G
tgaggtgatgaagtctcgatcactagacgggagatgctgccaagtgccccagacgggatcaagactccantgacaaccatangattccctaaagctaagacactgcaaaaaaaaaaa

SEQ ID NO: 421 - DNA, 133 bp, Homo sapiens
  misc_feature (1)...(133): n = A,T,C or G
tccagactgagggatttatcaaagatgtcccgaagactccctccagttgtttttgaaaataattgggcaaccanaaacgccaggttccgtttaatgaagtgcgattaccaccaccacctgatataaaaaaaaa

SEQ ID NO: 422 - DNA, 109 bp, Homo sapiens
  misc_feature (1)...(109): n = A,T,C or G
gactgaggtgatgaagtctcgatcactagacgggagatgctgccaagtgccccagacgggatcaagactccaatgacanccataagnttccctaaagctaagacactgc

SEQ ID NO: 423 - DNA, 114 bp, Homo sapiens
  misc_feature (1)...(114): n = A,T,C or G
ttacacactgggtgatgaagtctcgatcactagacgggagatgctgccaagtgccccagacgggatcaagnctncaatgacaaccataagattccctaaagctaagacactgca

SEQ ID NO: 424 - DNA, 121 bp, Homo sapiens
taaacctgggtgatgaagtctcggtcctagacgggagatgctgccaagtgccccagacgggatcaagactccgatgacaaccataagattccctaaagctaagacactgcaaaaaaaaaaa

SEQ ID NO: 425 - DNA, 117 bp, Homo sapiens
agactggtgtgaagtctcgatcctagacgggagatgctgccaagtgccccagacgggatcaagactccaatgacaaccataagattccctaaagctaagacactgcaaaaaaaaaaa

SEQ ID NO: 426 - DNA, 108 bp, Homo sapiens
ctgaggtgatgaagtctcgatcactagacgggagatgctgccaagtgccccagacgggatcaagactccaatgacaaccataagattccctaaagctaagacactgca

SEQ ID NO: 427 - DNA, 103 bp, Homo sapiens
  misc_feature (1)...(103): n = A,T,C or G
gtgatgaagttttcgatcactagacgggagatgctgccaagtgccccagacgggatcaagactccaatgacaaccatangattccctaaagctaagacactgc

SEQ ID NO: 428 - DNA, 110 bp, Homo sapiens
gactgaggtgatgaagtctcgatcactagacgggagatgctgccaagtgccccagacgggatcaagactccaatgacaaccataagattccctaaagctaagacactgca

SEQ ID NO: 429 - DNA, 129 bp, Homo sapiens
  misc_feature (1)...(129): n = A,T,C or G
tgtgagaccatttgaggtgatgaagtctcgatcactagacgggagatgctgccaagtgccccagacgggatcaagactccantgacaaccataagattccctaaagctaagacactgcaaaaaaaaaaa

SEQ ID NO: 430 - DNA, 108 bp, Homo sapiens
tgaagtctcgatcctagacgggagacgctgccaagtgccccagacgggatcaagactccaatgacaaccataagattccctaaagctaagacactgcaaaaaaaaaaa

SEQ ID NO: 431 - DNA, 108 bp, Homo sapiens
gactgaggtgatgaagtctcgatcctagacgggagatgctgccaagtgccccagacgggatcaagactccaatgacaaccataagattccctaaagctaagacactgc

SEQ ID NO: 432 - DNA, 121 bp, Homo sapiens; identical to SEQ ID NO: 349

SEQ ID NO: 433 - DNA, 120 bp, Homo sapiens
actgaggtgatgaagtctcgatcactagacgggagatgctgccaagtgccccagacgggatcaagactccaatgacaaccataagattccctaaagctaagacactgcagaaaaaaaaaa

SEQ ID NO: 434 - DNA, 125 bp, Homo sapiens
ttgacacactgaggtgatgaagtctcgatcctagacgggagatgctgccaagtgccccagacgggatcaagactccaatgacaaccataagattccctaagctaagacactgcagaaaaaaaaaa

SEQ ID NO: 435 - DNA, 117 bp, Homo sapiens
ctgaggtgatgaagtctcgatcactagacgggagatgctgccaagtgccccagacgggatcaagactccaatgacaaccataagattccctaaagctaagacactgcaaaaaaaaaa

SEQ ID NO: 436 - DNA, 111 bp, Homo sapiens
tgatgaagtctcgatcctagacgggagatgctgccaagtgccccagacgggatcaagactccaatgacaaccacaagattccctaaagctaagacactgcaaaaaaaaaaa

SEQ ID NO: 437 - DNA, 120 bp, Homo sapiens
gactgaggtgatgaagtctcgatcactagacgggagatgctgccaagtgccccagacgggatcaagactccaatgacaaccataagattccctaaagctaagacactgcaaaaaaaaaaa

SEQ ID NO: 438 - DNA, 112 bp, Homo sapiens
  misc_feature (1)...(112): n = A,T,C or G
tgatgaagtctcgatcactagacgggagatgctgccaagngccccngacgggatcaagactccnntgacnaccatnagattccctnaagntaagacactgcaaaaaaaaaaa

SEQ ID NO: 439 - DNA, 117 bp, Homo sapiens
  misc_feature (1)...(117): n = A,T,C or G
gaggtgatgaagtctcgatcactagacgggagatgctgccaagtgccccagacgggatcaagactccaatgacnaccataagattccctaaagctaagacactgcagaaaaaaaaaa

SEQ ID NO: 440 - DNA, 120 bp, Homo sapiens
  misc_feature (1)...(120): n = A,T,C or G
cacttaggtgatgaagtctcgatcactagacgggagatgctgccangtgccccagacgggatcaagactccaatgacaaccataagattccctaaagctaagacactgcaaaaaaaaaaa

SEQ ID NO: 441 - DNA, 110 bp, Homo sapiens
gtgaagtctcgatcctagacgggagatgctgccaagtgccccagacgggatcaagactccaatgacaaccataagattccctaaagctaagacactgcagaaaaaaaaaa

SEQ ID NO: 442 - DNA, 123 bp, Homo sapiens
agacactgaggtgatgaagtctcgatcactagacgggagatgctgccaagtgccccagacgggatcaagactccaatgacaaccataagattccctaaagctaagacactgcaaaaaaaaaaa

SEQ ID NO: 443 - DNA, 107 bp, Homo sapiens
  misc_feature (1)...(107): n = A,T,C or G
ctgggtgatgaagtctcgatcactagacgggagatgctgccaagtgccccagacgggatcaagactncaatggcnaccataaganttccctaaagctaagacactgc

SEQ ID NO: 444 - DNA, 119 bp, Homo sapiens
aagactgggtgtgaagtctcgatcctagacgggagatgctgccaagtgccccagacgggatcaagactccaatgacaaccataagattccctaaagctaagacactgcaaaaaaaaaaa

SEQ ID NO: 445 - DNA, 117 bp, Homo sapiens
tgaggtgatgaagtctcgatcctagacgggagatgctgccaagtgccccagacgggatcaagactccaatgacaaccataagattccctaaagctaagacactgcagaaaaaaaaaa

SEQ ID NO: 446 - DNA, 131 bp, Homo sapiens
gactgagtatggcactgaggtgatgaagtctcgatcctagacgggagatgctgccaagtgccccagacgggatcaagactccaatgacaaccataagattccctaaagctaagacactgcaaaaaaaaaaa

SEQ ID NO: 447 - DNA, 122 bp, Homo sapiens
agactgaggtgataaagcctcgatcactagacgggagatgctgccaagtgccccagacgggatcaagactccaatgacaaccataagattccctaaagctaagacactgcagaaaaaaaaaa

SEQ ID NO: 448 - DNA, 269 bp, Homo sapiens
  misc_feature (1)...(269): n = A,T,C or G
attgtcttgctgtgtgtnctcttgttaaccagctgcctcaactacagagattttctgccttgcctctaagtgctggatanngaacgcntnaaaccaccnnnaaccccccaatccttgactctcccccagggactggccaccaaccaaagaatacacntggngggaccaggctgcaaatgtgacagaggatgaccttgttgaccatctgatctaaagggaatgggagaagcaaagaaaaacatcttgtgatccctatatgcaaaaaaaaa

SEQ ID NO: 449 - DNA, 119 bp, Homo sapiens; identical to SEQ ID NO: 374

SEQ ID NO: 450 - DNA, 120 bp, Homo sapiens
agactgggtgatgaagtctcgatcctagacgggagatgctgccaagtgccccagacgggatcaagactccgatgacaaccataagattccctaaagctaagacactgcaaaagaaaaaaa

SEQ ID NO: 451 - DNA, 119 bp, Homo sapiens
gactgggtgatgaagtctcgatcactagacgggagatgctgccaagtgccccagacgggatcaagactccaatgacaaccataagattccctaaagctaagacactgcaaaaaaaaaaa

SEQ ID NO: 452 - DNA, 118 bp, Homo sapiens; identical to SEQ ID NO: 408

SEQ ID NO: 453 - DNA, 110 bp, Homo sapiens
gtgaagtctcgatcactagacgggagatgctgccgagtgccccagacgggatcaagactccaatgacaaccataagattccctaaagctaagacactgcaaaaaaaaaaa

SEQ ID NO: 454 - DNA, 104 bp, Homo sapiens
gaggtgatgaagtctcgatcactagacgggagatgctgccaagtgccccagacgggatcaagactccaatgacaaccgtaagattccctaaagctaagacactg

SEQ ID NO: 455 - DNA, 122 bp, Homo sapiens
gactgaggtgatgaagtctcgatcactagacgggagatgctgccaagtgccccagacgggatcaagactccaatgacaaccataagattccctaaagctaagacactgcagagaaaaaaaaa

SEQ ID NO: 456 - DNA, 117 bp, Homo sapiens; identical to SEQ ID NO: 402

SEQ ID NO: 457 - DNA, 114 bp, Homo sapiens
gtgatgaagtctcgatcactagacgggagatgctgccaagtgccccagacgggatcaagactccaatgacaaccataagattccctaaagctaagacactgcagaaaaaaaaaa

SEQ ID NO: 458 - DNA, 118 bp, Homo sapiens; identical to SEQ ID NO: 408

SEQ ID NO: 459 - DNA, 116 bp, Homo sapiens
  misc_feature (1)...(116): n = A,T,C or G
ccatgggtgtaaagcctcaatcactagacggganatgctgccaagngccccagacggnatcaagactccaatgacnaccataagattccctaaagctaagacactgcaaaaaaaag

SEQ ID NO: 460 - DNA, 120 bp, Homo sapiens
  misc_feature (1)...(120): n = A,T,C or G
gactgaggtgatgaagtctcgatcactagacgggagatgctgccaagtgccccagacgggatcaagactccaatgacaaccataagattccctaaagctnagacactgcaaaaaaaaaaa

SEQ ID NO: 461 - DNA, 123 bp, Homo sapiens
gaactgaggtgatgaagtctcgatcactagacgggagatgctgccaagtgccccagacgggatcaagactccaatgacaaccataagattccctaaagctaagacactgcagaagaaaaaaaa

SEQ ID NO: 462 - DNA, 121 bp, Homo sapiens; identical to SEQ ID NO: 349

SEQ ID NO: 463 - DNA, 124 bp, Homo sapiens
aagccctttggtgatgaagtctcgatcactagacgggagatgctgccaagtgccccagacgggattaagactccaatgacaaccataagattccctaaagctaagacactgcagaaaaaaaaaa

SEQ ID NO: 464 - DNA, 116 bp, Homo sapiens
aggtgatgaagtctcggtcactagacgggagatgctgccaagtgccccagacgggatcaagactccaatgacaaccttaagattccctaaggctaagacactgcagaaaaaaaaaa

SEQ ID NO: 465 - DNA, 120 bp, Homo sapiens; identical to SEQ ID NO: 437

SEQ ID NO: 466 - DNA, 121 bp, Homo sapiens; identical to SEQ ID NO: 349

SEQ ID NO: 467 - DNA, 111 bp, Homo sapiens
  misc_feature (1)...(111): n = A,T,C or G
ccgtttgaagtctcgtcctagacgggagacgctgcnagtgccccagacgggatcaagactccaatgacnaccataagattccctaaagctaagacactgcaaaaaaaaaaa

SEQ ID NO: 468 - DNA, 108 bp, Homo sapiens
  misc_feature (1)...(108): n = A,T,C or G
agactgggtgtgaagtctcgtcactagacgggagatgctgnccaagtgccccagacgggatcaagactnccatgncaaccaataagattccctaaagctaagacactg

SEQ ID NO: 469 - DNA, 105 bp, Homo sapiens
gtctcgatcactagacgggagatgctgccaagtgccccagacgggatcaagactccaatgacaaccataagattccctaaagctaagacactgcaaaaaaaaaaa

SEQ ID NO: 470 - DNA, 109 bp, Homo sapiens
  misc_feature (1)...(109): n = A,T,C or G
gactgaggtgatgaagtcttgatcactagacgggagatgctgccaagtgccccagacgggatcaagactccaatgacnaccataagattccctaaagctatgacactgc

SEQ ID NO: 471 - DNA, 119 bp, Homo sapiens
cctgaggtgatgaagtctcgatcctagacgggagatgctgccaagtgccccagacgggatcaagactccaatgacaaccataagattccctaaagctaagacactgcagaaaaaaaaaa

SEQ ID NO: 472 - DNA, 158 bp, Homo sapiens
cactgaggctgaagaggagaatcccagattgccttcactcacaagatctggcagccagagccccgagtcccccaagcccagtgagcagttcaaatataaaaccgcacataacaagaaaagtgaagcaccatgaaactcttgtttgattaaaaaaaaaa

SEQ ID NO: 473 - DNA, 125 bp, Homo sapiens
atgtctctatactccagccagccagctgttgacgtgataggcagaagggattggagagacacaggtaaagaagcccaatgagttattaaaggtctatatttaaatctactggtacaaaaaaaaaa

SEQ ID NO: 474 - DNA, 128 bp, Homo sapiens
cgatgtctctatactccagccagccagctgttgacgtgataggcagaagggattggagagacacaggtaaagaagcccaatgagttattaaaggtctatatttaaatctactggtacaaaaaaaaaga

SEQ ID NO: 475 - DNA, 120 bp, Homo sapiens
  misc_feature (1)...(120): n = A,T,C or G
ctatactccagccagccagctgttgacgtgataggcagaagggattggagagacacaggtnaagaancccaatgagttattaaaggnctatatttaaatctactggtacaaaaaaaaaga

SEQ ID NO: 476 - DNA, 118 bp, Homo sapiens
tatactccagccagccagctgttgacgtgataggcagaagggattggagagacacaggtaaagaagcccaatgagttattaaaggtctatatttaaatctactggtacaaaaaaaaaa

SEQ ID NO: 477 - DNA, 104 bp, Homo sapiens
ccagctgttgacgtgataggcagaagggattggagagacacaggtaaagaagcccaatgagttattaaaggtctatatttaaatctactggtacaaaaaaaaaa

SEQ ID NO: 478 - DNA, 138 bp, Homo sapiens
gtgctgcctcgtcgatgtctctatactccagccagccagctgttgacgtgataggcagaagggattggagagacacaggtaaagaagcccaatgagttattaaaggtctatatttaaatctactggtacaaaaaaaaa

SEQ ID NO: 479 - DNA, 167 bp, Homo sapiens
  misc_feature (1)...(167): n = A,T,C or G
cagactgagtctgacaggttaatagcggnataagctgaacaatgtnactatactcnagcccaccanctgtngacagtgatangcagaagggattggagagacacaggtaaagaagcccaatgagttattaaaggtctatatttaaatctactggtacaaaaaaaaaa

SEQ ID NO: 480 - DNA, 110 bp, Homo sapiens
gccagccagctgttgacgtgataggcagaagggattggagagacacaggtaaagaagcccaatgagttattaaaggtctatatttaaatctactggtacaaaaaaaaaga

SEQ ID NO: 481 - DNA, 158 bp, Homo sapiens
  misc_feature (1)...(158): n = A,T,C or G
ctgacaggttaatagcagangaagatcgaanaatgaanaatatactcnagccngccanctggtgncgtnataggcagaagggattgnnnagacacaggtaangangcccaatgagttattaaaggtctatatttaaatctactggtacaaaaaaaaaa

SEQ ID NO: 482 - DNA, 129 bp, Homo sapiens
  misc_feature (1)...(129): n = A,T,C or G
tcgaatgtctctatactccagccagccagctgttgacgtgataggcanaagggattggagagacacaggtaaagaagcccaatgagttattaaaggtctatatttaaatctactggtacaaaaaaaaaa

SEQ ID NO: 483 - DNA, 189 bp, Homo sapiens; identical to SEQ ID NO: 353

SEQ ID NO: 484 - DNA, 149 bp, Homo sapiens
  misc_feature (1)...(149): n = A,T,C or G
ctggctgcagtgctgcctcgtcnatgtctctatactccagccagccagctgttgacgtgataggcagaagggattggagagacacangtaaagaagcccaatgagtnattaaaggtctatatttaaatctactggtacaaaaaaaaaga

SEQ ID NO: 485 - DNA, 119 bp, Homo sapiens
  misc_feature (1)...(119): n = A,T,C or G
gtctctatactccagccagccagctgttgacntnatangcagaagggattggagagacacaggtnaagaagcccantgagttattaaaggtctatatttaannctactggtacaaaaaa

SEQ ID NO: 486 - DNA, 150 bp, Homo sapiens
  misc_feature (1)...(150): n = A,T,C or G
ggatactgctgcagtgctgcctcgtcgatgtctctatactccagccagccngctgttgacgtgataggcatgaagggattggagagacacatnttnagaagcccaangagttattaaaggtctatatttaaatctactggtgcaaaacat

SEQ ID NO: 487 - DNA, 145 bp, Homo sapiens
gctgcagtgctgcctcgtcgatgtctctatactccagccagccagctgttgacgtgataggcagaagggattggagagacacaggtaaagaagcccaatgagttattaaaggtctatatttaaatctactggcacaaaaaaaaaa

SEQ ID NO: 488 - DNA, 161 bp, Homo sapiens
  misc_feature (1)...(161): n = A,T,C or G
gagcactgaggctgaagaggagaatcccagattgccttcctcacaagatctggcagccagagccccgagtcccccaagcccagtgagcagttcanatataaaaccgcacataacaagaaaagtgaagcaccatgaaactcttgtttggttaaaaaaaaaaa

SEQ ID NO: 489 - DNA, 145 bp, Homo sapiens
  misc_feature (1)...(145): n = A,T,C or G
gaggagaatcccagattgccttnctcacaagatctggcatgccagagcccngagtcccccaagcccagtgngcagttcaaatataaaaccgcacataacangaaaagtgaagcaccatgaaactcttgtttgattaaaaaaaaaa

SEQ ID NO: 490 - DNA, 146 bp, Homo sapiens
  misc_feature (1)...(146): n = A,T,C or G
gcatggatctggctgcagtgctgcctcgncgatgtctctatactccanccagccngctgttgacgtgataggcnnaagggattggagagacacaggtgaagaaccccnatgagttattaanggtntatatttaaatctactggttc

SEQ ID NO: 491 - DNA, 164 bp, Homo sapiens
  misc_feature (1)...(164): n = A,T,C or G
atgtagccatggctactaggctagcngatgctcgcctcgtcgattgtctctatactccagctcanncagctgtctgacngtgataggcanaaggnattggagagacacaggtagnanaancccaatgagttattaaaggtctatatttaaatctactggtacaa

SEQ ID NO: 492 - DNA, 189 bp, Homo sapiens
  misc_feature (1)...(189): n = A,T,C or G
gactgagcttggctgaagaggaaataaaaactgagcaggaggtggtggagggaatggatatctctactcgctccaaagatnctgtnnctacagagaaaacggccccgaaacggaagtnccccagccctgcacattcctccaatgnccattcnccccacnactcatccacgagccccattaaaaaaaaaa

SEQ ID NO: 493 - DNA, 189 bp, Homo sapiens; identical to SEQ ID NO: 353

SEQ ID NO: 494 - DNA, 188 bp, Homo sapiens
actgagcttggctgaagaggaaataaaaactgagcaggaggtggtggagggaatggatatctctactcgctccaaagatcctgtctctacagagaaaacggccccgaaacggaagttccccagccctccacattcctccaatggccattcgccccaagactcatccacgagccccattaaaaaaaaaa

SEQ ID NO: 495 - DNA, 352 bp, Homo sapiens
  misc_feature (1)...(352): n = A,T,C or G
gactgagatgagctccagtacctgcactntancccagaagccctgaagtgtgggccccgtaccctctgtacccagcggagttagcgcctgctcttcctcctcctgccgctttcacctaccccgcttcactgcatgcccagaggcnctgtanacatgcctangannncacttcngannnttgganactnctncagcacatgatgatgcngcnctgggaangngnntgncacatatnaacctactgcagacnatnaaagggagcttntnaggggaatntattacnaacccactnccttccccttttgnaaaananaactgttntttnacaatgtttgaaaaaaatcaataaaaa

SEQ ID NO: 496 - DNA, 126 bp, Homo sapiens
  misc_feature (1)...(126): n = A,T,C or G
atgtctctatactccagccagccngctgttgacgtgataggcatgangggattggagagacacaggtaaagaagcccaatgagttattaaaggcctatatttaaatctactggtacaaaaaaaaaa

SEQ ID NO: 497 - DNA, 160 bp, Homo sapiens
  misc_feature (1)...(160): n = A,T,C or G
actgggctggatctggctgcagtgcnnnctcgtcgatgtctctatactccagccagccagctgttgacgtgataggcaggagggattggagagacacaggtaaagaagcccaatgagttattaaaggtctatatttaaatctactggtacaaaaaaaaaa

SEQ ID NO: 498 - DNA, 126 bp, Homo sapiens
  misc_feature (1)...(126): n = A,T,C or G
ggctgcctcaacaatgacnatatactccngccanccagctgttnacgtgatatgcagaaggnattgnagagacacangtaaagaggcccaatgagttattaaaggnctatatttaaatctactggt

SEQ ID NO: 499 - DNA, 131 bp, Homo sapiens
aggcgatgtctctatactccagccagccagctgttgacgtgataggcagaagggattggagagacacaggtaaagaagcccaatgagttattaaaggtctatatttaaatctactggtacaaaaaaaaaga

SEQ ID NO: 500 - DNA, 102 bp, Homo sapiens
  misc_feature (1)...(102): n = A,T,C or G
ctgggtgtgaatctcgatcctanacgggagatgctgccaagtgccccagacgggatcaagactccaatgacaaccataagattccctaaagctaagacactg

SEQ ID NO: 501 - DNA, 119 bp, Homo sapiens
gactgggtgatgaagtctcgatcctagacgggagatgctgccaagtgccccagacgggatcaagactccaatgacaaccataagattccctaaagctaagacactgcgaaaaaaaaaaa

SEQ ID NO: 502 - DNA, 102 bp, Homo sapiens
gggtgtgaagtctcgatcccagacgggagatgctgccaagtgccccagacgggatcaagactccaatggcaaccataagattccctaaagctaagacactgc

SEQ ID NO: 503 - DNA, 118 bp, Homo sapiens; identical to SEQ ID NO: 408

SEQ ID NO: 504 - DNA, 118 bp, Homo sapiens
gactgagatcctgtctctacagagaaaacggccccgaaacggaagttccccagccctccacattcctccaatggccattcgccccaagactcatccacgagccccattaaaaaaaaaa

SEQ ID NO: 505 - DNA, 192 bp, Homo sapiens
ggacacactgagcttggctgaagaggaaataaaaactgagcaggaggtggtggagggaatggatatctctactcgctccaaagatcctgtctctacagagaaaacggccccgaaacggaagttccccagccctccacattcctccaatggccattcgccccaagactcatccacgagccccaaaaaaaaaaa

SEQ ID NO: 506 - DNA, 120 bp, Homo sapiens; identical to SEQ ID NO: 433

SEQ ID NO: 507 - DNA, 113 bp, Homo sapiens
gagatcctgctctacagagaaaacggccccgaaacggaagttccccagccctccacattcctccaatggccattcgccccaagactcatccacgagccccattaaaaaaaaaa

SEQ ID NO: 508 - DNA, 172 bp, Homo sapiens
  misc_feature (1)...(172): n = A,T,C or G
cccccctttcactgcagcnggntctggctgcantgctgcctcgnacgatgtctctatactccagccagccagctgttgacgtgatangcacaagggattggagagacacaggtaaagangcccantgagttattaaaggtctatatttaaatctactggtacaaaaaaaaaa

SEQ ID NO: 509 - DNA, 109 bp, Homo sapiens
cctgtctctacagagaaaacggccccgaaacggaagttccccagccctccacattcctccaatggccattcgccccaagactcatccacgagccccattaaaaaaaaaa

SEQ ID NO: 510 - DNA, 152 bp, Homo sapiens
  misc_feature (1)...(152): n = A,T,C or G
ctggcctggctgcagtgctgcctcgtcgatgtctctatactccanccagccagctgttgacgtgataggcagaagggattggagagacacaggtanngaagcccaatgagttattaaaggnctatatttaaatctactggtaaaaaaaaaaa

SEQ ID NO: 511 - DNA, 149 bp, Homo sapiens
tctggctgcagtgctgcctcgtcgatgtctctatactccagccagccagctgttgacgtgataggcagaagggattggagagacacaggtaaagaagcccaatgagttattaaaggtctatatttaaatctactggtacaaaaaaaaaa

SEQ ID NO: 512 - DNA, 119 bp, Homo sapiens
agactgggtgatgaagtctcgatcctagacgggagatgctgccaagtgccccagacgggatcaagactccaatgacaaccataagattccctaaagctaagacactgcaaaaaaaaaaa

SEQ ID NO: 513 - DNA, 194 bp, Homo sapiens
ttgaagactgagcttggctgaagaggaaataaaaactgagcaggaggtggtggagggaatggatatctctactcgctccaaagatcctgtctctacagagaaaacggccccgaaacggaagttccccagccctccacattcctccaatggccattcgccccaagactcatccacgagccccattaaaaaaaaaa

SEQ ID NO: 514 - DNA, 124 bp, Homo sapiens
gttgagactgtggtttgaagtcttgatcctagacgggagatgctgccaagtgccccggacgggatcaagactccaatgacaaccataagattccctaaagctaagacactgcagaaaaaaaaaa

SEQ ID NO: 515 - DNA, 121 bp, Homo sapiens
aagactgggtgatgaagtctcgatcctagacgggagatgctgccaagtgccccggacgggatcaagactccaatgacaaccataagattccctaaagctaagacactgcagaaaaaaaaaa

SEQ ID NO: 516 - DNA, 120 bp, Homo sapiens
agactgggtgtgaagtctcgatcactagacgggagatgctgccaagtgccccggacgggatcaagactccaatgacaaccataagattccctaaagctaagacactgcagaaaaaaaaaa

SEQ ID NO: 517 - DNA, 121 bp, Homo sapiens
agactgggtgatgaagtctcgatcactagacgggagatgctgccaagtgccccagacgggatcaagactccaatgacaaccataagattccctaaagctaagacactgcagaaaaaaaaaa

SEQ ID NO: 518 - DNA, 192 bp, Homo sapiens
  misc_feature (1)...(192): n = A,T,C or G
aaagatggcgcagagattcaacganctggatgctttnncagaggacccaccnagngggtcacanccgatcacttacanagggacgggcatcctcttctgacctctgaggacattgtacatgcatggtgcatagatttacatgcaagcaaacgcctgtacacgtaaaataagtaataaaagtctttaacacat

SEQ ID NO: 519 - DNA, 118 bp, Homo sapiens
  misc_feature (1)...(118): n = A,T,C or G
tccaaagatcctgtctctacagagaaaacggccccgaaacggaagntncccagcccttcacattcctccaatggccattcgncccaagactcatccacgagccccattaaaaaaaaaa

SEQ ID NO: 520 - DNA, 143 bp, Homo sapiens
ggagaatcccagattgccttcactcacaagatctggcagccagagccccgagtcccccaagcccagtgagcagttcaaatataaaaccgcacataacaagaaaagtgaagcaccatgaaactcttgtttgattaaaaaaaaaa

SEQ ID NO: 521 - DNA, 152 bp, Homo sapiens
  misc_feature (1)...(152): n = A,T,C or G
ggctgaacaggagaatcccanattgccttcactcacaagatctggcagccagagccccgagtcccccaagcccagtgagcagttcaaatataaaaccgcacataataagaaaagtgaagcaccatgaaactcttgtttgattaaaaaaaaaa

SEQ ID NO: 522 - DNA, 132 bp, Homo sapiens
  misc_feature (1)...(132): n = A,T,C or G
tgtcttcactcacaagatctggcagncaagagccccgagtcccccaagcccagtgagcagttcaaatataaaaccgcacataacaagaaaagtgaagcaccatgaaactcttgtttgattgaaaaaaaaaaa

SEQ ID NO: 523 - DNA, 113 bp, Homo sapiens
agatcctgtctctacagagaaaacggccccgaaacggaagttccccagccctccacattcctccaatggccattcgccccaagactcatccacgagccccattaaaaaaaaaa

SEQ ID NO: 524 - DNA, 157 bp, Homo sapiens
gactgagctttgaattcatgagaaagaagagtgtgaaacaagaagcaaagatcgggttggaagagggcaagaggaaagggggggatggaaggaaaccctgcagccaccaacacaataaacacaataaactgtatcctgaccacctcaaaaaaaaaaa

SEQ ID NO: 525 - DNA, 168 bp, Homo sapiens
  misc_feature (1)...(168): n = A,T,C or G
actgaggaagtttggtgagcggnctccacccanncgactcactagggaagctatgcnacattatttaancagaacgatggggatcaaacagtgctcattcttcatgcaaaagttgcacagaagtctnacggaaatgaaaaacgattnttttgccctcctccttgtgtg

SEQ ID NO: 526 - DNA, 119 bp, Homo sapiens
  misc_feature (1)...(119): n = A,T,C or G
aaaactactctgcatatnactcttcacaagcatnaacaagtgatcttccacccctctgcctctcctctgcaanaacagcnagtgctcttaacctgttaatcatggagcattttcactag

SEQ ID NO: 527 - DNA, 134 bp, Homo sapiens
  misc_feature (1)...(134): n = A,T,C or G
gaaaactactctgcatatnactcttcanaagcantaacaagtgatcttccacccctctgcctctcctctgcnagaacagcnagtgctcttaacctgttaatcatggagcattttcactagcataaaagaaaaaa

SEQ ID NO: 528 - DNA, 118 bp, Homo sapiens
ctgaggtgatgaagtctcgatcctagacgggagatgctgccaagtgccccagacgggatcaagactccaatgacaaccataagattccctaaagctaagacactgcagaaaaaaaaaa

SEQ ID NO: 529 - DNA, 120 bp, Homo sapiens
  misc_feature (1)...(120): n = A,T,C or G
ctgaggatctagactgaggtgangaagnctcgatcctagacgggagatgctgccaagtgccccagacgggatcaagactccaatgacnaccataagattccctaaagctaagacactgca

SEQ ID NO: 530 - DNA, 196 bp, Homo sapiens
  misc_feature (1)...(196): n = A,T,C or G
tttgacacactgagcttggctgaanaggaaataaaaactgagcaggaggtggtggagggaatggatatctctactcgctccanagatnctgtctctacagagaaaacggccccgaaacggaagttccccagccctccacattcctccaatggccattcgccccaagactcatccacgagccccattaaaaaaaaaa

SEQ ID NO: 531 - DNA, 157 bp, Homo sapiens
  misc_feature (1)...(157): n = A,T,C or G
ctagggaagctatgcnanatnatttaaaagaacgaggggatcaaacagtgctcattcttcatgcaaaagttgcacagaagtcttacggaaatgaaaaacgatttttttgccctcctccttgtgtgtatcttatgggcagtggttggaaaaaaaaaaa

SEQ ID NO: 532 - DNA, 116 bp, Homo sapiens
ctgggtgtgaagcctcgatcctagacgggagatgctgccaagtgccccagacgggatcaagactccaatgacaaccataagattccctaaagctaagacactgcagaaaaaaaaaa

SEQ ID NO: 533 - DNA, 193 bp, Homo sapiens
  misc_feature (1)...(193): n = A,T,C or G
acagactgagcttggctgaagangaaataaaaactgancaggaggtggngggagggaatggatatctntactcgctccaaagatcctgtctctacagagaaaacggccccgaaacggaagttccccagccctccacattcctccaatggccattcgccccaagactcatccacgagccccattaaaaaaaaaa

SEQ ID NO: 534 - DNA, 164 bp, Homo sapiens
  misc_feature (1)...(164): n = A,T,C or G
ccctgacggagctgganctacaatgcnactgngaaaactactntgcatatnacnnttcacaagcagtaacaagtgaacttccacccctctgcctctcctctgcaaagaacagcaagtgctcttaacctgttaatcatggagcattttcactagcaaaaaaaaaa

SEQ ID NO: 535 - DNA, 196 bp, Homo sapiens
  misc_feature (1)...(196): n = A,T,C or G
tcaatttacacctgcgatcactgncancangacttcaagtctctggcnnacctgacggacnnccggncccaccgctgtcctggaggtaatgctaaatagcgccgggattctgacaggtggttacacggataattggacatagcaccagcttgaagcctcacgtgagattaaagaattantaatgtaaaaaaaaaaa

SEQ ID NO: 536 - DNA, 178 bp, Homo sapiens
aggtcagtcagctcccctggtggagctggagctacaagcaactgtgaaaactactctgcatattactcttcaaaggcagtaacaagtgatcttccacccctctgcctctcctctgcaaggaacaagcaagtgctcttaacctgttaatcatggagcattttcactaataacaaaaaaa

SEQ ID NO: 537 - DNA, 158 bp, Homo sapiens
  misc_feature (1)...(158): n = A,T,C or G
gactgaggctgaagaggngaatcccatattgcnttcactcacaagatctggcagccagagccccgagtcccccaagcccagtgagcagttcaaatataaaaccgcacataacaagaaaagtgaagcaccatgaaactcttgtttgattaaaaaaaaaa

SEQ ID NO: 538 - DNA, 225 bp, Homo sapiens
  misc_feature (1)...(225): n = A,T,C or G
caccctgaggcctgtgctncatactgntttgaagataanaaacctgcttggctngnaangaggttcccaaatggggaaactcaatagtagttcccctgtgccaccactctgggccttttaatgccaagaaagaattcagccgcagaagaccttggagatggtggcggacgtgcagaatgatggaggacttgcagaaaccatngaccccggccacccaaacctttt

SEQ ID NO: 539 - DNA, 162 bp, Homo sapiens
  misc_feature (1)...(162): n = A,T,C or G
aggacccacccaggggntcacaaccgttcanttccanagggacgggcatcctnttntgacctntgaggacntngtacatgcatggggcatagattcacatgcaagcaaacgcctgtncacgtaaagtaaagtaacaaaaagtctttaccacacaaaaaaaaa

SEQ ID NO: 540 - DNA, 207 bp, Homo sapiens
  misc_feature (1)...(207): n = A,T,C or G
aactgagtgagagactgagatgaaaagantgngagagacnggcttgcttttnnagaggacnantcncgaggnncagaaccngccnacttncagagggactgggcatactattctgacctntgaggacattgaacatacatggngcatagatttacatgcaagcaaacgcctgtacacgtaaaataagnaataaaagtctttaacaca

SEQ ID NO: 541 - DNA, 161 bp, Homo sapiens
  misc_feature (1)...(161): n = A,T,C or G
agactgaggtggttgaagactgggggcnggagngctttgnaaacagaagacctgcaggaaatgccgagtaatgacttgtgttggttcaccctccctgctcccgtcttcttttaaaacaaataaacggaatggaaacgcccacattacttacaaaaaaaaaa

SEQ ID NO: 542 - DNA, 104 bp, Homo sapiens
  misc_feature (1)...(104): n = A,T,C or G
ttctgacctctgaggacattgnacatgcatggtgcatagatttacatgcaagcaaacgcctgtacacgtaaaataagtaataaaagtctttaacacgaaaaaaa

SEQ ID NO: 543 - DNA, 188 bp, Homo sapiens; identical to SEQ ID NO: 494

SEQ ID NO: 544 - DNA, 161 bp, Homo sapiens
  misc_feature (1)...(161): n = A,T,C or G
gtcagctcccctggtggagntggagctacaagcaactgngaaaactactctgcatattactcttcaaaagcagtaacaagtgatcttccacccctctgcctctcctctgcaagaacagnanagtgctcttaacctgttaatcatggagcattttcactagc

SEQ ID NO: 545 - DNA, 120 bp, Homo sapiens
gactgaggtgatgaagtctggatcactagacgggagatgctgccaagtgccccagacgggatcaagactccaatgacaaccataagattccctaaagctaagacactgcaaaaaaaaaaa

SEQ ID NO: 546 - DNA, 125 bp, Homo sapiens
aggagtgctttgcaaacagaagacctgcaggaaatgccgagtaatgacttgtgttggttcaccctccctgctcccgtcttcttttaaaacaaataaacagaatggaaacgcccacaaaaaaaaaa

SEQ ID NO: 547 - DNA, 234 bp, Homo sapiens
ggggttggaaagatggcgcagagattacaagagctggctgcttttccagaagacccaaccccaggtgggttcacaacccgttcactttccagaggggacggggcatcctcttctgacctctggaggacattgtacatgcatggtgcatagatttacatgcaaagcaaacgcctgtacacgtaaaataagtaataaaagtctttaacacatctctttaaagttcaaaaaaaaaaa

SEQ ID NO: 548 - DNA, 161 bp, Homo sapiens
  misc_feature (1)...(161): n = A,T,C or G
agactgggctgaagaggagaatcccagattgccttcacttncaaagaatctggcngnccngagccccgagtcccccaagcccagtgagcagttcaaatataaaaccgcacataacaagaaaagtgaagcaccatgaaactcttgtttgattaaaaaaaaaa

SEQ ID NO: 549 - DNA, 163 bp, Homo sapiens
ttggagactgggctgaagaggagaatcccagattgccttcactcacaagatctgggcagccagagccccgagtcccccaagcccagtgagcagttcaaatataaaaccgcacataacaagaaaagtgaagcaccatgaaactcttgtttgattaaaaaaaaaa

SEQ ID NO: 550 - DNA, 153 bp, Homo sapiens
  misc_feature (1)...(153): n = A,T,C or G
aggctgaagaggagaatcccagattgccttcactcacaagatctggcagccagagccccgagtcccccaagcccagtgagcagttcaaatatnaaaccgcacataacaagaaaagtgaagcaccatgaaactcttgtttgattaaaaaaaaaa

SEQ ID NO: 551 - DNA, 155 bp, Homo sapiens
  misc_feature (1)...(155): n = A,T,C or G
ctgggttgaagaggagaatnccagattgccttcactcacaagatntggcagcctgagccccgagtcccccangcccagtgagcagttcaaatataaaaccgcacataacaagaaaagtgaagcaccatgaaactcttgtttgattaaaaaaaaaa

SEQ ID NO: 552 - DNA, 112 bp, Homo sapiens
  misc_feature (1)...(112): n = A,T,C or G
gattgctttgcaaacagaagacctgcaggaaatgccgagtaatgacttgtgttggttcaccctccctgctcccgtcttcctttaaaacaaataancagaatggaaacgccca

SEQ ID NO: 553 - DNA, 163 bp, Homo sapiens
  misc_feature (1)...(163): n = A,T,C or G
tttacacactgagctgantngagaatcccagtactgccttcactcgcaagatctggcagccagagccccgagtcccccaagcccagtgagcagntcaaatntaaaaccgcacataacaagaaaagtgangcaccatgaaactcttgtttgattaaaaaaaaaa

SEQ ID NO: 554 - DNA, 160 bp, Homo sapiens
cagactgaggctgaagaggagaatcccagattgccttcactcacaagatctggcagccagagccccgagtcccccaagcccagtgagcagttcaaatataaaaccgcacataacaagaaaagtgaagcaccatgaaactcttgtttgattaaaaaaaaaa

SEQ ID NO: 555 - DNA, 218 bp, Homo sapiens
  misc_feature (1)...(218): n = A,T,C or G
ttgagaattcctaaganggtncagagantacaagagctggctgcttttccagaggacccacccacnggctcanaactcgttcactnncanagggacgggcngnctcttctgacctctgaggacattgtacatgcatggttgcatagattttacatgcaagcaaacgcctgtncacgtaaaaataagtaataaaagtctttaacacatcaaaaaaaaaa

SEQ ID NO: 556 - DNA, 156 bp, Homo sapiens
ctgaggctgaagaggagaatcccagattgccttcactcacaagatctggcagccagagccccgagtcccccaagcccagtgagcagttcaaatataaaaccgcacataacaagaaaagtgaagcaccatgaaactcttgtttgattaaaaaaaaaa

SEQ ID NO: 557 - DNA, 135 bp, Homo sapiens
  misc_feature (1)...(135): n = A,T,C or G
ccagattgccttcactcacaagatctggcagncagagccccgagtcccccaagcccagtgagcagttcaaatataaaaccgcacataacaagaaaagtgaagcaccatgaanctcttgtttgattaaaaaaaaaa

SEQ ID NO: 558 - DNA, 149 bp, Homo sapiens
  misc_feature (1)...(149): n = A,T,C or G
tgaagaggagaatcccagnttgccttcactcacaagatctggcagccagagccccgagtcccccaagcccagtgagcagttcaaatataaaaccgcacataacaagaaaagtgaagcaccatgaaactcttgtttgattaaaaaaaaaa

SEQ ID NO: 559 - DNA, 156 bp, Homo sapiens; identical to SEQ ID NO: 556

SEQ ID NO: 560 - DNA, 158 bp, Homo sapiens
ctgaggctgaagaggagaatcccagattgccttcactcacaagatctggcagccagagccccgagtcccccaagcccagcgagcagttcaaatataaaaccgcacataacaagaaaagtgaagcaccatgaagctcttgtttgattgaaaaaaaaaaa

SEQ ID NO: 561 - DNA, 156 bp, Homo sapiens
gaggctgaagaggagaatcccagattgccttcactcacaatgatctggcatgccagagccccgagtcccccaagcccagtgagcagttcaaatataaaaccgcacataacaagaaaagtgaagcaccatgaaactcttgtttgattaaaaaaaaaa

SEQ ID NO: 562 - DNA, 158 bp, Homo sapiens; identical to SEQ ID NO: 472

SEQ ID NO: 563 - DNA, 170 bp, Homo sapiens
  misc_feature (1)...(170): n = A,T,C or G
aaggcgaagaacctacttggacctcactgttataggcctcncttngnacccctattatattgcccgacattgtcaaagttccccaccacatnaaaggccatcttcntgtgcaagctgntncacacaggcctctgaggaaattttnntgtgttctggaagctctaaagaaa

SEQ ID NO: 564 - DNA, 103 bp, Homo sapiens
cagagccccgagtcccccaagcccagtgagcagttcaaatataaaaccgcacataacaagaaaagtgaagcaccatgaaactcttgtttgattaaaaaaaaaa

SEQ ID NO: 565 - DNA, 186 bp, Homo sapiens
tgagcttggctgaagaggaaataaaaactgagcaggaggtggtggagggaatggatatctctactcgctccaaagatcctgtctctacagagaaaacggccccgaaacggaagttccccagccctccacattcctccaatggccattcgccccaagactcatccacgagccccattaaaaaaaaaa

SEQ ID NO: 566 - DNA, 159 bp, Homo sapiens
agactgaggctgaaggggagaatcccagattgccttcactcacaagatctggcagccagagccccgagtcccccaagcccagtgagcagttcaaatataaaaccgcacataacaagaaaagtgaagcaccatgaaactcttgtttgattaaaaaaaaaa

SEQ ID NO: 567 - DNA, 159 bp, Homo sapiens
  misc_feature (1)...(159): n = A,T,C or G
acagactgggctgaagagganaatcccagattgccttcctcacaagatctggcagccagagccccgagtcccccaagtccagtgagcagttcaaatataanaccgcacataacaagaaaagtgaagcaccatgaaactcttgtttgattaaaaaaaaaa

SEQ ID NO: 568 - DNA, 157 bp, Homo sapiens
agactgggctgaagaggagaatcccagattgccttcctcacaagatctggcagccagagccccgagtcccccaagcccagtgggcagttcaaatataaaaccgcacataacaagaaaagtgaagcaccatgaaactcttgtttgattaaaaaaaaaa

SEQ ID NO: 569 - DNA, 217 bp, Homo sapiens
  misc_feature (1)...(217): n = A,T,C or G
actgaggctgaagattacaatnanctggctgcttttccagagggacccacccagtgggnttcacaacccgttccactttccagaagggacggggcatcctcttttgacctctgnggacattgtacatgcatggngcatagatttacatgcaagcaaacgcctgtncccgtaaaataagtaataaaagtctttaacacatctctttaagaaaaaaaaa

SEQ ID NO: 570 - DNA, 215 bp, Homo sapiens
  misc_feature (1)...(215): n = A,T,C or G
tcatttcttcttcctttncngtttacctnaatttaaccccnnctttnncnacactgnggcatggactggctgcagtgctgcctcgtagatgtctctatactccagccagccngctgntgacgtnatnggcngaagggatnggngagacacaggtnaagaancccantgagttattaaaggtctatatattaaatctactggttcaaaaaaaaaaa

SEQ ID NO: 571 - DNA, 105 bp, Homo sapiens
ccagctgttgacgtgataggcagaagggattggagagacacaggtaaagaagcccaatgagttattaaaggtctatatttaaatctactggtacaaaaaaaaaga

SEQ ID NO: 572 - DNA, 187 bp, Homo sapiens
ctgagcttggctgaagaggaaataaaaactgagcaggaggtggtggagggaatggatatctctactcgctccaaagatcctgtctctacagagaaaacggccccgaaacggaagttccccagccctccacattcctccaatggccattcgccccaagactcatccacgagccccattaaaaaaaaaa

SEQ ID NO: 573 - DNA, 160 bp, Homo sapiens
agaactgaggctgaagaggagaatcccagattgccttcactcacaagatctggcagccagagccccgagtcccccaagcccagtgagcagttcaaatataaaaccgcacataacaagaaaagtgaagcaccatgaaactcttgtctgattaaaaaaaaaa

SEQ ID NO: 574 - DNA, 168 bp, Homo sapiens
gcctgggtctagaagtccgaagaggtcagtcagctcccctggtggagctggagcccaagcaactgtgaaaactactctgcatattactcttcaaaagcagtaacaagtgatcttccacccctctgcctctcctctgcaagaacagcaagtggctttaacccggtaaac

SEQ ID NO: 575 - DNA, 119 bp, Homo sapiens
ctgaggtgatgaagtctcgattactagacgggagatgctgccaagtgccccggacgggatcaagactccaataacaaccataagattccctaaagctaagacactgcagaaaaaaaaaa

SEQ ID NO: 576 - DNA, 116 bp, Homo sapiens
ctgggtgtgaagtctcgatcactagacgggagacgctgccaagtgccccagacgggatcaagactccaatgacaaccataagattccctaaagctaagacactgcaaaaaaaaaaa

SEQ ID NO: 577 - DNA, 159 bp, Homo sapiens
  misc_feature (1)...(159): n = A,T,C or G
cagactgagctttgaattcnngagaangaagagtgtgaaacaagaagcaaagatcgggttggaagagggcaagaggaaagggggggatggaaggaaaccctgcagccaccaacacaataaacacaataaactgtatcctgaccacctcaaaaaaaaaaa

SEQ ID NO: 578 - DNA, 122 bp, Homo sapiens
agactgaggtgatgaagtctcgatcactagacgggagatgctgccaagtgccccagacgggatcaagactccaatgacaaccataagattccctaaagctaagacactgcagaaaaaaaaaa

SEQ ID NO: 579 - DNA, 103 bp, Homo sapiens
tcgatcactagacgggagatgctgccaagtgccccagacgggatcaagactccaatgacaaccataagattccctaaagctaagacactgcagaaaaaaaaaa

SEQ ID NO: 580 - DNA, 118 bp, Homo sapiens
ctgttgtgatgaagtctcgatcactagacgggagatgctgccaagtgccccagacgggatcaagactccaatgacaaccataagattccctaaagctaagacactgcaaaaaaaaaaa

SEQ ID NO: 581 - DNA, 119 bp, Homo sapiens
ctgaggtgatgaagtctcgatcactagacgggagatgctgccaagtgccccagacgggatcaagactccaatgacaaccataagattccctaaagctaagacactgcgaaaaaaaaaaa

SEQ ID NO: 582 - DNA, 116 bp, Homo sapiens
  misc_feature (1)...(116): n = A,T,C or G
gccctgaggtgatgaagtctcgatcactagacgggagatgctgccaagtgccctagacgggatcaagactccaatgncaaccataagattncctaaagctaagacactgcagaaaa

SEQ ID NO: 583 - DNA, 120 bp, Homo sapiens
gactgaggtgatgaagtctcgatcactagacgggagatgctgccaagtgccccagacgggatcaagactccaatgacaaccataagattccctaaggctaagacactgcaaaaaaaaaaa

SEQ ID NO: 584 - DNA, 119 bp, Homo sapiens
  misc_feature (1)...(119): n = A,T,C or G
ctgaggtgatgaagtctngatcactagacgggagatgctgccaagtgccccagacgggatcaagactccaatgacaaccataagattccctaaagctaagacactgcagaaaaaaaaaa

SEQ ID NO: 585 - DNA, 118 bp, Homo sapiens
actgagatcctgtctctacagagaaaacggccccgaaacggaagttccccagccctccacattcctccaatgggccattcgccccaagactcatccacgagccccattaaaaaaaaaa

SEQ ID NO: 586 - DNA, 146 bp, Homo sapiens
gaggagaatcccagattgccttcactcacaagatctggcaggccagagccccgagtcccccaagcccagtgagcagttcaaatataaaaccgcacataacaagaaaagtgaagcaccatgaaactcttgtttgattaaaaaaaaaa

SEQ ID NO: 587 - DNA, 113 bp, Homo sapiens
atatggcagccagagccccgagtcccccaagcccagtgagcagttcaaatataaaaccgcacataacaagaaaagtgaagcaccatgaaactcttgtttgattaaaaaaaaaa

SEQ ID NO: 588 - DNA, 116 bp, Homo sapiens
  misc_feature (1)...(116): n = A,T,C or G
gccttcactcacaagatctggctgccagagccccgagtccccccgcccagtgagcanttcaaatatgaaaccgcacataacaagaaaagtgaagcaccatgaaactcttgtttgat

SEQ ID NO: 589 - DNA, 157 bp, Homo sapiens
gactgaggctgaagaggagaatcccagattgccttcctcacaagatctggcagccagagccccgagtcccccaagcccagtgagcagttcaaatataaaaccgcacataacaagaaaagtgaagcaccatgaaactcttgtttgattaaaaaaaaaa

SEQ ID NO: 590 - DNA, 157 bp, Homo sapiens
gactgaggctgaagaggagaatcccagattgccttcactcacaagatctggcagccagagccccgagtcccccaagcccagtgagcagttcaatataaaaccgcacataacaagaaaagtgaagcaccatgaaactcttgtttgattaaaaaaaaaa

SEQ ID NO: 591 - DNA, 157 bp, Homo sapiens
gactgaggctgaagaggagaatcccagattgccttcactcacaagatctggcagccagagccccgagtccccaagcccagtgagcagttcaaatataaaaccgcacataacaagaaaagtgaagcaccatgaaactcttgtttgattaaaaaaaaaa

SEQ ID NO: 592 - DNA, 158 bp, Homo sapiens
gactgaggctgaagaggagaatcccagattgccttcactcacaagatctggcagccagagccccgagtcccccaagcccagtgagcagttcaaatataaaaccgcacataacaagaaaagtgaagcaccatgaaactcttgtttgattaaaaaaaaaa

SEQ ID NO: 593 - DNA, 140 bp, Homo sapiens
  misc_feature (1)...(140): n = A,T,C or G
aagaaattaaattagccgttttcgccgaggcccgccaggacggagcgattctacggaggaaggagcacgccaacagggcctgactgcgtacagaaatgccccccctcaataaaattgcngttgaaatggaaaaaaaaaaa

SEQ ID NO: 594 - DNA, 110 bp, Homo sapiens
gactgaggtgatgaagtctcgatcactagacgggagatgctgccaagtgccccagacgggatcaagactccagtgacaaccataagattccctaaagctaagacactgca

SEQ ID NO: 595 - DNA, 112 bp, Homo sapiens
  misc_feature (1)...(112): n = A,T,C or G
ccatttgaggtgacgaagtctctatcactagacgggagatgctgccaagtgccccagacgggatcaagactccnttgacaaccataagattccctaaagctaagacactgca

SEQ ID NO: 596 - DNA, 137 bp, Homo sapiens
gctctggggagctccagaactgaggtgatgaagtctcgatcctagacgggagatgctgccaagtgccccagacgggatcaagactccaatgacaaccataagattccctaaagctaagacactgcagaaaaaaaaaa

SEQ ID NO: 597 - DNA, 114 bp, Homo sapiens
  misc_feature (1)...(114): n = A,T,C or G
gtgatgaagtctcgatcactagacgggagatgctgccaagngccccagacgggatcaagactccaatgacaaccataagattccctaaagctaagacactgcagaaaaaaaaaa

SEQ ID NO: 598 - DNA, 119 bp, Homo sapiens
tgaagtgatgaagtctcgatcactatgacgggagatgctgccaagtgccccagacgggatcaagactccaatgacaaccataagattccctaaagctaagacactgcagaaaaaaaaaa

SEQ ID NO: 599 - DNA, 122 bp, Homo sapiens
gaactgaggtgatgaagtctcgatcactagacgggagatgctgccaagtgccccagacgggatcaagactccaatgacaaccataagattccctaaagctaagacactgcgaaaaaaaaaaa

SEQ ID NO: 600 - DNA, 120 bp, Homo sapiens
  misc_feature (1)...(120): n = A,T,C or G
agactgggtgatgaagtctcgatcctagacgggagatgctgccaagtgccccagccgggatttngactccaatgacaaccataagattccctaaagctaagacactgcagaaaaaaaaaa

SEQ ID NO: 601 - DNA, 146 bp, Homo sapiens
  misc_feature (1)...(146): n = A,T,C or G
agaggagaatcccagattgcnttnactcacaagatctggcagccagagccccgagtcccccaagcccagtgagcagttcaaatataaaaccgcacataacangaaaagtgaagcaccatgaaacacttgtttgattaaaaaaaaaa

SEQ ID NO: 602 - DNA, 171 bp, Homo sapiens
  misc_feature (1)...(171): n = A,T,C or G
cagaggacccacccagaggctcacaaccgttcacttccagagggacgggcatcctnttctgacctctgaggacattgtacatgcatggtgcatagatttacntgcaagcaaacgcctgtacacgtaaaataagtaataaaagtctttaacacatctctttaaaaaaaaaaa

SEQ ID NO: 603 - DNA, 149 bp, Homo sapiens
  misc_feature (1)...(149): n = A,T,C or G
actgagggggttgaagactgngggcgggagngcttngcaaacnnaanacctgcaggaaatgccgagtaatgacttgtgttggttcaccctccctgctcccgtcttcttttaaaacaaataaacagaatggaaacgccagaaaaaaaaaa

SEQ ID NO: 604 - DNA, 191 bp, Homo sapiens
  misc_feature (1)...(191): n = A,T,C or G
gaaataacaagagctggctgctttnccagaggacccacccaggggctcacaaccgnncacttccagagggacagggcatcctcttctgacctctgaggacattgtacatgcatggtgcatagatttacatgcaagcaaacgcctgtacacgtaaganaagtaataaaagtctttaacacatctctttaaag

SEQ ID NO: 605 - DNA, 169 bp, Homo sapiens
agactgggtggagactgaggctgaagaggagaatcccagattgccttcctcacaagatctggcagccagagccccgagtcccccaagcccagtgagcagttcaaatataaaaccgcacataacaagaaaagtgaagcaccatgaaactcttgtttgattaaaaaaaaaa

SEQ ID NO: 606 - DNA, 143 bp, Homo sapiens
  misc_feature (1)...(143): n = A,T,C or G
agagaatcccagattgccttcactcacaagatctggcagccagagccccgagtcccccaagcccagtgagcagttcaaatataaaaccgcacatancaagaaaagtgaagcaccatgaaactcttgtttgattaaaaaaaaaa

SEQ ID NO: 607 - DNA, 122 bp, Homo sapiens
  misc_feature (1)...(122): n = A,T,C or G
tcacaagatctggcancnaganccccgagtcccccaagcccagtgagcngttnaaanntanaaccgcacatatcagananaaggagaagcaccatgaaactcttgtttgattaaaaaaaaaa

SEQ ID NO: 608 - DNA, 161 bp, Homo sapiens
  misc_feature (1)...(161): n = A,T,C or G
ttgttgacgggctctcaaggcncacaaccgtnnactttcagagggacgggcatactnttctgacctntgaggacattgnacatgcatggtgcatagatttacatgcaagcaaacgcctgtacacgtaaaataagnaataaaagtctttaacacaaaaaaaa

SEQ ID NO: 609 - DNA, 189 bp, Homo sapiens
aagactgagcttggctgaagaggaaataaaaactgagcaggaggtggtggagggaatggatatctctactcgctccaaagatcctgtctctacagagaaaacggccccgaaacggaagttccccagccctccacattcctccaatggccattcgccccaagactcatccacgagccccaaaaaaaaaaa

SEQ ID NO: 610 - DNA, 160 bp, Homo sapiens
actgagcaggaggtggtggagggaatggatatctctactcgctccaaagatcctgtctctacagagaaaacggccccgaaacggaagttccccagccctccacattcctccaatggccattcgccccaagactcatccacgagccccattaaaaaaaaaa

SEQ ID NO: 611 - DNA, 122 bp, Homo sapiens
ttagactgagatcctgtctctacagagaaaacggccccgaaacggaagttccccagccctccacattcctccaatgggccattcgccccaagactcatccacgagccccattaaaaaaaaaa

SEQ ID NO: 612 - DNA, 356 bp, Homo sapiens
  misc_feature (1)...(356): n = A,T,C or G
agactgaatgagctacagtacctgcactttaccccagtagccctgaagtgtgggccccgtaccctctgtacccagcggagttagcgcctgctcttcctcctcctgccgntttcacctaccccgcttcactgcatgcccagaggcnctgtatacatgcatacgagnacacntctganntntgnaacttactgncaacatatgatganngctgtctgggaatgagcctggcacatatcanacctactgcagaccanaaacggagcttncgcncggaatgtattanaacncnctncctcacttttggaaanaananctgttctttgacactgtncgaaaganccaataaaaaattttaa

SEQ ID NO: 613 - DNA, 141 bp, Homo sapiens
agattatttaaaagaacgaggggatcaaacagtgctcattcttcatgcaaaagttgcacagaagtcttacggaaatgaaaaacgatttttttgccctcctccttgtgtgtatcttatgggcagtggttggaaaaaaaaaaa

SEQ ID NO: 614 - DNA, 189 bp, Homo sapiens; identical to SEQ ID NO: 353

SEQ ID NO: 615 - DNA, 162 bp, Homo sapiens
agactgaggctgaagaggagaatcccagattgccttcactcacaagatctggcagccagagccccgagtcccccaagcccagtgagcagttcaaatataaaaccgcacataacaagaaaagtgaagcaccatgaaactcttgtttgattaaaaaaagaagaa

SEQ ID NO: 616 - DNA, 119 bp, Homo sapiens
aactgaggtgatgaggtctcgatcctagacgggagatgctgccaagcgccccagacgggatcaagactccaatgacaaccataagattccctaaagctaagacactgcaaaaaaaaaaa

SEQ ID NO: 617 - DNA, 124 bp, Homo sapiens
  misc_feature (1)...(124): n = A,T,C or G
gcgtgtcaccgatgccgtcaggacggagcggattctnacggnngaaggagcacgccaacanggcctgactgcgtacagacatgtccccctcaataaaattgcagttgaaatggaaaaaaaaaaa

SEQ ID NO: 618 - DNA, 120 bp, Homo sapiens
  misc_feature (1)...(120): n = A,T,C or G
cactgaggtgatgaggtctcgatcactagacgggagatgctgccaagngccccngacgggatcaagactncnntgacnaccatnagattccctaaagctaagacactgcaaaaaaaaaaa

SEQ ID NO: 619 - DNA, 121 bp, Homo sapiens; identical to SEQ ID NO: 349

SEQ ID NO: 620 - DNA, 121 bp, Homo sapiens
  misc_feature (1)...(121): n = A,T,C or G
agagactgagatcctgtctctacagagaaaacggccccgaaacggaagttccccagncctccacattcctccaatggccattcgccccaagactcatccacgagccccattaaaaaaaaaa

SEQ ID NO: 621 - DNA, 109 bp, Homo sapiens
  misc_feature (1)...(109): n = A,T,C or G
gaagtctcgatcactagacgggagatgctgccangtgccccagacgggatcaagactccaatggcggncataagattccctaaagctaagacactgcagaaaaaaaaaa

SEQ ID NO: 622 - DNA, 111 bp, Homo sapiens
  misc_feature (1)...(111): n = A,T,C or G
agactgaggtgatgaagtctcgatcactagacgggagatgctgccaagtgccccagacgngatcaagactccaatgacaaccataagattccctaaagctaggacactgca

SEQ ID NO: 623 - DNA, 113 bp, Homo sapiens
tgatgaagtctcgatcactagacgggagatgctgccatgtgccccagacgggatcaagactccaatgacaaccataagattccctaaagctaagacactgcagaaaaaaaaaa

SEQ ID NO: 624 - DNA, 120 bp, Homo sapiens
cactgaggtgatgaagtctcgatcactagacgggagatgctgccaagtgccccagacgggatcaagactccaatgacaaccataagattccctaaagctaagacactgcaaaaaaaaaaa

SEQ ID NO: 625 - DNA, 157 bp, Homo sapiens
  misc_feature (1)...(157): n = A,T,C or G
gagcaggaggtggtggagggaatggatatctctactcgctccaaagatcctgtctctacagagaaaacggncccgaaacggaagttccccagccctccacattcntccaatggccattcgccccaagactcatccacgagccccattaaaaaaaaaa

SEQ ID NO: 626 - DNA, 120 bp, Homo sapiens
ccctgaggtgatgaggtctcgatcactagacgggagatgctgctaagtgccccagacgggatcaagagtccaatgacaaccataagattccctaaagctaagacactgcaaaaaaaaaaa

SEQ ID NO: 627 - DNA, 114 bp, Homo sapiens
  misc_feature (1)...(114): n = A,T,C or G
tgatgaagtctcgatcactagacgggagatgctgccaagtgccccagacgggatcaagactccaatgacaaccataagattccccaaagctnagacactgcagaagaaaaaaaa

SEQ ID NO: 628 - DNA, 121 bp, Homo sapiens
gactgaggtgatgaagtctcgatcactagacgggagatgctgccaagtgccccagacgggatcaagactccaatgacaaccataagattccctaaagctaagacactgcgaaaaaaaaaaa

SEQ ID NO: 629 - DNA, 101 bp, Homo sapiens
tacagagaaaacggccccgaaacggaagttccccagccctccacattcctccaatggccattcgccccaagactcatccacgagccccattaaaaaaaaaa

SEQ ID NO: 630 - DNA, 118 bp, Homo sapiens
tgaggtgatgaagtctcgatcactagacgggagatgctgccaagtgccccagacgggatcaagactccaatgacaaccataagattccctaaagctaagacactgcgaaaaaaaaaaa

SEQ ID NO: 631 - DNA, 120 bp, Homo sapiens; identical to SEQ ID NO: 410

SEQ ID NO: 632 - DNA, 137 bp, Homo sapiens
  misc_feature (1)...(137): n = A,T,C or G
aaacactgatgtgcgcgtgtcgccnaggccngacaggacggagcgattctcacggaggaaggagcacagcacaacagggcctgactgcgtacagaaatgccccccctcaataaaattgcagttgaaatgaaaaaaaa

SEQ ID NO: 633 - DNA, 120 bp, Homo sapiens
aactgaggtgatgaagtctcgatcactagacgggagatgctgccaagtgccccagacgggatcaagactccaatgacaaccataagattccctaaagctaagacactgcaaaaaaaaaaa

SEQ ID NO: 634 - DNA, 111 bp, Homo sapiens
  misc_feature (1)...(111): n = A,T,C or G
acattgaggtgatgaagtctcgatcactanacgggagatgctgccaagtgccccngacgggatcaagactccantgacaaccataagattccctaaagctaagacactgca

SEQ ID NO: 635 - DNA, 120 bp, Homo sapiens; identical to SEQ ID NO: 633

SEQ ID NO: 636 - DNA, 125 bp, Homo sapiens
gccagactgaggtgatgaagtctcgatcactagacgggagatgctgccaagtgccccagacgggatcaagactccaatgacaaccataagattccctaaagctaagacactgcagaaaaaaaaaa

SEQ ID NO: 637 - DNA, 120 bp, Homo sapiens
agactgggtgatgaagtctcgatcctagacgggagatgctgccaagtgccccagacgggatcaagactccaatgacaaccataagatcccctaaagctaaggcactgcagaaaaaaaaaa

SEQ ID NO: 638 - DNA, 139 bp, Homo sapiens
tcccagattgccttcactcacaagatctggcagccagagccccgagtcccccaagcccagtgagcagttcaaatataaaaccgcacataacaagaaaagtgaagcaccatgaaactcttgtttgattgaaaaaaaaaaa

SEQ ID NO: 639 - DNA, 120 bp, Homo sapiens
ctattgccttcactcacaagatctggcagccagagccccgagtcccccaagcccagtgagcagttcaaatataaaaccgcacataacaagaaaagtgaagcaccatgaaactcttgtttg

SEQ ID NO: 640 - DNA, 143 bp, Homo sapiens
ggagaatcccagattgccttcactcacaggatctggcagccagagccccgagtcccccaagcccagtgagcagttcaaatataaaaccgcacataacaagaaaagtgaagcaccatgaaactcttgtttgattaaaaaaaaaa

SEQ ID NO: 641 - DNA, 128 bp, Homo sapiens
  misc_feature (1)...(128): n = A,T,C or G
attgccttctctcacaagatctggnagccngagncccgagtnccccatgnccagcgagcagttnanatataaaaccgctcataacaagaaaagtgaagcaccatgaaactcttgtttgattagaaaaa

SEQ ID NO: 642 - DNA, 165 bp, Homo sapiens
  misc_feature (1)...(165): n = A,T,C or G
gcttttccaagaggacccacccaggaggctcacaaccngttcacttccagagggacgggcatcctcttctgacctctgaggacattgtacatgcatggtgcatagatttacatgcaagcaaacgcctgtacacgtaaaataagtaataaaaggctttagcacaca

SEQ ID NO: 643 - DNA, 195 bp, Homo sapiens
  misc_feature (1)...(195): n = A,T,C or G
gacaccgagatttccaganctggctggttttccagangaccccccagtggctnacaaccgttcactttcagagggacgggcatcctcttctgacctctgaggacattgtgcatgcntggngcatatatttacatgcgagcaaacgcctgtgcacagtnaaataagtaataaaagtntttatcacacaaaaaaaaa

SEQ ID NO: 644 - DNA, 162 bp, Homo sapiens
  misc_feature (1)...(162): n = A,T,C or G
aaacccctgaggctgaagaggagaatcccagattgccttcactcacaagatctggcagccagagccccgagtcccccaagcccagtgagcagttcaaatataaaaccgcacataacaagnaaagtgaagcaccatgaaactcttgtttgattaaaaaaaaaa

SEQ ID NO: 645 - DNA, 104 bp, Homo sapiens
  misc_feature (1)...(104): n = A,T,C or G
aggacccacccagtggctcacaaccnttcacttcnanangnacngncatcctnttctgacctctgaggacattgtacatgcatggagcatagatttacatgcaa

SEQ ID NO: 646 - DNA, 133 bp, Homo sapiens
ggagaatcccagattgccttcactcacaagatctggcagccagagccccgagtcccccaagcccagtgagcagttcaaatataaaaacgcgcataacaagaaaagtgaagcaccatgaaactcttgtttgatt

SEQ ID NO: 647 - DNA, 223 bp, Homo sapiens
  misc_feature (1)...(223): n = A,T,C or G
gggttggaaagatggcacagcagattacaagagctggctgcttttccagaggacccacccagtgggctcacaacccgttcactttccaganggacggggcatccctcttctgacctntgagagacatttgnacatgcatgngtgcatagatttacatgcaagcaaacngcctgtacacgtaaaataagtaataaaagtctttaacacatctcaaaaaaaaaaa

SEQ ID NO: 648 - DNA, 117 bp, Homo sapiens
actgagatcctgtctctacagagaaaacggccccgaaacggaagttccccagccctccacattactccaatggccattcgccccaagactcatccacgagccccattaaaaaaaaaa

SEQ ID NO: 649 - DNA, 158 bp, Homo sapiens; identical to SEQ ID NO: 472

SEQ ID NO: 650 - DNA, 208 bp, Homo sapiens
  misc_feature (1)...(208): n = A,T,C or G
ggagagatggcgcagagattacaaganctggnttgctttttcagaggaccnntccagngggtcacaacncgatcacttngcagagggacanggcttccttntctgacctctgaggacattgtacatgcatggtgcatatgatttacatgcaagcaaacgcctntacacgtaaaataagtaataaaagtctttaacacgaaaaaaaaaa

SEQ ID NO: 651 - DNA, 133 bp, Homo sapiens
ctgggggcaggagtgctttgcaaacagaagacctgcaggaaatgccgagtaatgacttgtgttggttcaccctccctgctcccgtcttcttttaaaacaaataaacagaatggaaacgcccacaaaaaaaaaa

SEQ ID NO: 652 - DNA, 101 bp, Homo sapiens
acctgcaggaaatgccgagtaatgacttgtgttggttcaccctccctgctcccgtcttcttttaaaacaaataaacagaatggaaacgccaaaaaaaaaaa

SEQ ID NO: 653 - DNA, 148 bp, Homo sapiens
  misc_feature (1)...(148): n = A,T,C or G
cactgaggctgaagaggagaatcccagattgccttcactcacaagatctggcagccagagccccgagtcccccaagcccagtgagcngttcaaatataaaaccgcacataacanagaaaagtgaagcaccatgaaactcttgtttgat

SEQ ID NO: 654 - DNA, 158 bp, Homo sapiens; identical to SEQ ID NO: 592

SEQ ID NO: 655 - DNA, 155 bp, Homo sapiens
  misc_feature (1)...(155): n = A,T,C or G
ctttgctgaagaggagaatcctagattgccttnactcacaagatctggcagccagagccccgagtcccccaagcccagtgagcagttcaaatataaaaccgcacataacaagaaaagtgaagcaccatgaaactcttgtttgattaaaaaaaaaa

SEQ ID NO: 656 - DNA, 119 bp, Homo sapiens
cagattgccttcactcacaagatctggcagccagagccccgagtcccccaagcccagtgagcagttcaaatataaaaccgcacataacaagaaaagtgaagcaccatgaaactcttgtt

SEQ ID NO: 657 - DNA, 153 bp, Homo sapiens
  misc_feature (1)...(153): n = A,T,C or G
aggctgaagaggagaatcccagattgccttcactcacaagatctggcagccagagccccgagtcccccaagcccagtgagcagttcaaatataaaaccgcacataacangaaaagtgaagcaccatgaaactcttgtttgattaaaaaaaaaa

SEQ ID NO: 658 - DNA, 145 bp, Homo sapiens
gaggagaattccagattgccttcactcacaagatctggcagccagagccccgagtcccccaagcccagtgagcagttcaaatataaaaccgcacataacaagaaaagtgaagcaccatgaaactcttgtttgattaaaaaaaaaa

SEQ ID NO: 659 - DNA, 151 bp, Homo sapiens
  misc_feature (1)...(151): n = A,T,C or G
acactgaggtggttgaanactgggggcaggangngcntngcaannatnatanctgnaggaaatgccgngtaatgacttgtgttggttcaccctccctgctcccgtnttcttttaaaacaaataaacagaatggaaacgccaaaaaaaaaaa

SEQ ID NO: 660 - DNA, 156 bp, Homo sapiens
  misc_feature (1)...(156): n = A,T,C or G
tcccagactgaggtggttgaagactgagggcaagantgctntgangacataananctgctngaaggngcngtgnaatgacttgngntggttcaccctccctgctcccgtcttcttttaaaacaaataaacagaatggaaacgccaaaaagaaaaaa

SEQ ID NO: 661 - DNA, 160 bp, Homo sapiens
gactgaggctgaagaggagaatcccagattgccttcactcacaagatctggcagccagagccccgagtcccccaagcccagtgagcagttcaaatataaaaccgcacataacaagaaaagtgaagcaccatgaaactcttgtttgattgaaaaaaaaaaa

SEQ ID NO: 662 - DNA, 161 bp, Homo sapiens
  misc_feature (1)...(161): n = A,T,C or G
caactgaggctgaagaggagaatcccagattgccttcactcacaagatctggcagncagagccccgagtcccccaagcccagtgagcagttcaaatataaaaccgcacataacaagaaaagtgaagcaccatgaaactcttgtttgattgaaaaaaaaaaa

SEQ ID NO: 663 - DNA, 139 bp, Homo sapiens
  misc_feature (1)...(139): n = A,T,C or G
aatcccagattgccttcactcacaanatntggcanccagagccccgagtcccccaagcccagtgagcagttcaaatataaaaccgcacataacaagaaaagtgaagcaccatgaaactcttgtttgattaaaaaaaaaa

SEQ ID NO: 664 - DNA, 106 bp, Homo sapiens
  misc_feature (1)...(106): n = A,T,C or G
agactgggtgtgaagtctcgatnctaggcgggagatgctgccaagcgccccagacgggatcaagactccaatgacaaccataagattccctaaagctaagacactg

SEQ ID NO: 665 - DNA, 114 bp, Homo sapiens
ggtgatgaagtctcgatcctagacgggagatgctgccaagtgccccagacgggatcaagactccaatgacaaccataagattccctaaagctaagacactgcagaaaaaaaaaa

SEQ ID NO: 666 - DNA, 141 bp, Homo sapiens
gcgtgagaggagaatcccagattgccttcctcacaagatctggcagccagagccccgagtcccccaagcccagtgagcagttcaaatataaaacccgcacataacaagaaaagtgaagcaccatgaaactcttgtttgatt

SEQ ID NO: 667 - DNA, 169 bp, Homo sapiens
gcgagttgtgagcgcctcccccaacgactcctagggaagctatgcgaaattatttaaaagaacgaggggatcaaacagtgctcattcttcatgcaaaagttgcacagaagtcttacggaaatgaaaaacgatttttttgccctcctccttgtgtgtatcttatgggcag

SEQ ID NO: 668 - DNA, 215 bp, Homo sapiens
  misc_feature (1)...(215): n = A,T,C or G
gagatgataaaaaaataggaaaaaaagattacanngagctggcctgcttttccanaggacccacccagnggctcacaaccngtncacttccagagggacagggcatcctcttntgacctctgaggacattgtacatgcatggnagcatagatttacatgcaagcaaacngcctgtacacgtaaaaaagtaataaaagtctttaacacaaaaaaaa

SEQ ID NO: 669 - DNA, 159 bp, Homo sapiens
agactgaggctgaagaggagaatcccagattgccttcactcacaagatctggcagccagagccccgagtcccccaagcccagtgagcagttcaaatataaaaccgcacataacaagaaaagtgaagcaccatgaaactcttgtttgattaaaaaaaaaa

SEQ ID NO: 670 - DNA, 139 bp, Homo sapiens
tgaagaggagaatcccagattgccttcactcccaagatctggcaagccagagccccgagtcccccaagcccagcgagcagttcaaatataaaaccgcacataacaagaaaagtgaagcaccatgaagctcttgtttgat

SEQ ID NO: 671 - DNA, 173 bp, Homo sapiens
ttgaaccccccttgacccctgggctgacggggagaatcccagattgccttcactcacaagatctggcagccagagccccgagtcccccaagcccagtgagcagttcaaatataaaaccgcacataacaagaaaagtgaagcaccatgaaactcttgtttgattaaaaaaaaaa

SEQ ID NO: 672 - DNA, 262 bp, Homo sapiens
  misc_feature (1)...(262): n = A,T,C or G
ctaccttgaacttgtcattcncctacctccacctctgaagagctgggagtgcntgtgtgccatgnaggctaggaaangnaaggcgggcttngntaaaggcttntgnggccnacctggtgccaggaggaatgnctcatgatcgcatggtgganaaagagacctgactccanaaggctgcatatacacactggcacacatatgcacagtaaataaatgtaatactaataaagaagtttctcttcttttcatcgaaaaaaaaaaa

SEQ ID NO: 673 - DNA, 164 bp, Homo sapiens
  misc_feature (1)...(164): n = A,T,C or G
taatctagaatgaggnggaagaggacaanngcagattgccttcctcacangatctgnttgccagagccctgagtccnncaagcccaggagagcatgttcaaatataaaaccgcacataacanagaaaagtgaagcaccatgaaactcttgtttgattaaaaaaa

SEQ ID NO: 674 - DNA, 152 bp, Homo sapiens
gctgaagaggagaatcccagattgccttcctcacaagatctggcagccagagccccgagtcccccaagcccagtgagcagttcaaatataaaaccgcacataacaagaaaagtgaagcaccatgaaactcttgtttgattgaaaaaaaaaaa

SEQ ID NO: 675 - DNA, 143 bp, Homo sapiens
  misc_feature (1)...(143): n = A,T,C or G
ggctcacaaccgtgcacttnctnagggacgggcatcctcttctgacctctgaggacattgnacatgcatggggcatagatttacatgcaagcgaacgcctgtacacgtaaaataagtaataanagtctttaacacaaaaaaaa

SEQ ID NO: 676 - DNA, 192 bp, Homo sapiens
  misc_feature (1)...(192): n = A,T,C or G
aaatgaagggactccttgngtaaaggcatctgccaccagtcctggtgaccanagttcaatcctcaggatcgcatggtggagaaagagacctgactccagaaggctgcatatacacactggcacacatatgcacagtaaataaatgtaatactaataaagaagtttctcttcttttcatcgaaaagaaaaaaa

SEQ ID NO: 677 - DNA, 101 bp, Homo sapiens
gagaaggttggagttttaatgattcaggcggctctggcggccaggctgcgcgatatggtccgcacctagactgttgagctgggggtagaggaaaaaaaaaa

SEQ ID NO: 678 - DNA, 119 bp, Homo sapiens
  misc_feature (1)...(119): n = A,T,C or G
tcacaagatctggcagccnganccccgagtccccnaagcccagtgagcngttcaaatataaaaccgcacataacagagataagtgaagcaccatgaaactcttgtttgattaaaaaaaa

SEQ ID NO: 679 - DNA, 159 bp, Homo sapiens
  misc_feature (1)...(159): n = A,T,C or G
gagcattaaaaaggacccnccagtggctcacanccgttcacttccagagggacgggcatcctcttctgacctctgaggacattgtacatgcatggtgcatagatttacatgcaagcaaacgcctgtacacgtaaaataagtaataaaagtctttaacac

SEQ ID NO: 680 - DNA, 336 bp, Homo sapiens
  misc_feature (1)...(336): n = A,T,C or G
agaactgagatgagctcacagtacctgcactttaccccagtagccctgaagngtgggccccgtaccctctgtacccagcggagttagcgcctgctcttcctcctcctgccgctttnacctaccccgcttcactgcatgcccagagnnnctgtatacatgcataggannacacnnctgagnnttgganactncttcagcanangangatngnngcnctgggaatgngtttggcacatatnaacctactgnagaccagnaaagggagcttnngngngngaatntattancaacncactcccttgccccttttgcaaaaaaaaactattttttgataat

SEQ ID NO: 681 - DNA, 129 bp, Homo sapiens
  misc_feature (1)...(129): n = A,T,C or G
tgccttcactcacaagatctggcagccagagccccgagtcccccaagcccagtgagcagttcanatataaaaccgcacataacaagaaaagtgaagcaccatgaaactcttgtttgattaaaaaaaaaa

SEQ ID NO: 682 - DNA, 163 bp, Homo sapiens
  misc_feature (1)...(163): n = A,T,C or G
aaccactgaggctgttgaggaccattccanantggcnttcantnacaanatttggcagccagagccccgagtcccccaagcccagtggagcagttcaaatntaaaaccgcccataacaagaaaagtgaagcaccatgaaactcttgtttgattaaaaaaaaaa

SEQ ID NO: 683 - DNA, 155 bp, Homo sapiens
ctgggctgaagaggagaatcccagattgccttcactcacaagatctggcagccagagccccgagtcccccaagcccagtgagcagttcaaatataaaaccgcacataacaagaaaagtgaagcaccatgaaactcttgtttgattaaaaaaaaaa

SEQ ID NO: 684 - DNA, 116 bp, Homo sapiens
  misc_feature (1)...(116): n = A,T,C or G
actgaggtaacatttcacttgttgcctttccagtttcaagcaccaactcaccaacaaagattttaccgaaanccttagggccaataaatgtgaatgttggaccccaaaaaaaaaaa

SEQ ID NO: 685 - DNA, 156 bp, Homo sapiens
  misc_feature (1)...(156): n = A,T,C or G
ctgaggctgaagaggagaatcccagatngccttcactnacaagatctggnagccagagccccgngtcccccaagcccagngagcagntcaantataaaaccgnacataacangaaaagtgnngcaccatgaaactcttgtttgatgaaaaaaaaaa

SEQ ID NO: 686 - DNA, 104 bp, Homo sapiens
aaaacctgcaggaaatgccgagtaatgacttgtgttggttcaccctccctgctcccgtcttcttttaaaacaaataaacagaatggaaacgccaaaaaaaaaaa

SEQ ID NO: 687 - DNA, 260 bp, Homo sapiens
  misc_feature (1)...(260): n = A,T,C or G
tcatcgtattctgtttctttttcannttntataatctctttctttttanttagtgtnttntntnagcngtntttctcgngntgtntacactgngattgtctgcnctgnggctgaagaggagaatcccagattgccttcactcacaagatctggcagccagagccccgagtcccccaagcccagtgagcagttcaaatataaaaccgcacatancaagaaaggtgaagcaccatgaaactcttgtttgattaaaaaaaaaa

SEQ ID NO: 688 - DNA, 166 bp, Homo sapiens
  misc_feature (1)...(166): n = A,T,C or G
tttttcattcattgtggctgngtngagaatcccagattgccttcactcacaagatctggcagccagagccccgagtcccccaagcccagtgagcagttcaaatataaaaccgcacataacaagaaaagtgaagcnccatgaaactcttgtttgattaaaaaaaaaa

SEQ ID NO: 689 - DNA, 199 bp, Homo sapiens
  misc_feature (1)...(199): n = A,T,C or G
cactgaggaagtttggtgagcggnctccacccggacgactcctatnggaagctatgcgaaattatttaaaagaacgaggggatcaaacagtgctcattcttcatgcaaaagttgcacagaagtcttacggaaatgaaaaacgatttttttgccctcctccttgtgtgtatcttatgggcagtggttggaaaaaaaaaaa

SEQ ID NO: 690 - DNA, 145 bp, Homo sapiens
  misc_feature (1)...(145): n = A,T,C or G
ctgtgccaccactctgggccttttaatgccnagaaagaattcngccgcagaagaccttggagatggtggcggacgtgcnnaatgatggnggacttgcanaaaccatggacccngcccacccaaacccttccgtaacactaaagtt

SEQ ID NO: 691 - DNA, 124 bp, Homo sapiens
  misc_feature (1)...(124): n = A,T,C or G
ggcaggatgctttgcaaacagaagacctgcaggaaatgccgagtaatgacttgtgttggttcaccctccctgctcccgtcttcttttaaaacaaataaacagaatgnaaacgccaaaaaaaaaa

SEQ ID NO: 692 - DNA, 110 bp, Homo sapiens
aacacgaagacctgcaggaaatgccgagtaatgacttgtgttggttcaccctccctgctcccgtcttcttttaaaacaaataaacagaatggaaacgccaaaaaaaaaaa

SEQ ID NO: 693 - DNA, 128 bp, Homo sapiens
  misc_feature (1)...(128): n = A,T,C or G
ccacattgccttcactcacaagatctggcagncagagccccgagtnccccaagcccantgagcagttcaaatatannaacgcgcataacaagaaaagtgaagcaccatgaaactcttgtttgattaga

SEQ ID NO: 694 - DNA, 154 bp, Homo sapiens
  misc_feature (1)...(154): n = A,T,C or G
gctgacgagacaatcccagatgccttcactaacaagatctgnnagctcagtagcccnnngtcccncaagcccagtgagcagttcaaatataaaaccgcacataacaagaaaagtgaagcaccatgaaactcttgtttgattaaaaaaagaagaa

SEQ ID NO: 695 - DNA, 161 bp, Homo sapiens
  misc_feature (1)...(161): n = A,T,C or G
tctttatacactgagctgaagaagagaatcccagatgccttcactcacaagatctggcagtcagagcccngagtcccccaagcccagtgagcagctnaaatataaaaccgcacataacaangaaaagtgaagcaccangaaactcttgtttgattaaaaaa

SEQ ID NO: 696 - DNA, 113 bp, Homo sapiens
  misc_feature (1)...(113): n = A,T,C or G
acctgcgggaaatgccgagtaatgacttgngtggggtcaccctccctgctnccgtnttcttttaaaacaaataaacagaatggaaacgcccacattacttactaaaaaaaaaa

SEQ ID NO: 697 - DNA, 145 bp, Homo sapiens
aagcaatcccagattgccttcactcacaagcatctaggcagccagagccccgagtcccccaagcccagtgagcagttcaaatataaaaccgcacatgacaagaaaagtgaagcaccatgaaactcttgtttgattaaaaaaaaaa

SEQ ID NO: 698 - DNA, 150 bp, Homo sapiens
  misc_feature (1)...(150): n = A,T,C or G
gctgaacagagaatcccagatgccttcactcacaagatctggcagccagagccccgagtcccccaagcccagtgagcagtttcaaatataaaaccgcacataacangaaaagtgaagcaccatgaaactcttgnttgattaaaaaaaaaa

SEQ ID NO: 699 - DNA, 158 bp, Homo sapiens; identical to SEQ ID NO: 592

SEQ ID NO: 700 - DNA, 104 bp, Homo sapiens
  misc_feature (1)...(104): n = A,T,C or G
cacccaaacgactcactagggtaagctatgcnanattatttaaaagaacgangggatcaaacagtgctcattcttcatgcaaaagttgcacagaagtcttacgg

SEQ ID NO: 701 - DNA, 144 bp, Homo sapiens
ggagaatcccagattgccttcactcacaagatctggcagcctgagccccgagtcccccaagcccagtgagcatgttcaaatataaaaccgcacataacaagaaaagtgaagcaccatgaaactcttgtttgattaaaaaaaaaa

SEQ ID NO: 702 - DNA, 115 bp, Homo sapiens
  misc_feature (1)...(115): n = A,T,C or G
agatctggcagccagagccccgagtcccccaagcccagtgagcagttcaaatataaaaccgcacataacaagnaaagtgaagcaccatgaaactcttgtttgattaaaaaaaaaa

SEQ ID NO: 703 - DNA, 169 bp, Homo sapiens
  misc_feature (1)...(169): n = A,T,C or G
gcctcccagactgagggaagctatncgaaattatttaaaagaacgaggggatcaaacagngctcattcttcatgcaaaagttgcacagaagtnttacggaaatgaaaaacgatttttttgccctcctccttgtgtgtatcttatgggcagtggttggaagaaaaaaaaa

SEQ ID NO: 704 - DNA, 133 bp, Homo sapiens
  misc_feature (1)...(133): n = A,T,C or G
gactgggggcgggggngctttgcaaacngaagacctgcaggaaatgccgagtaatgacttgtgttggttcaccctccctgctcccgtcttcttttaaaacaaataaacagaatggaaacgcaagaaaaaaaaa

SEQ ID NO: 705 - DNA, 189 bp, Homo sapiens
cactgagcttggctgaagaggaaataaaaactgagcaggaggtggtggagggaatggatatctctactcgctccaaagatcctgtctctacagagaaaacggccccgaaacggaagttccccagccctccacattcctccaatggccattcgccccaagactcatccacgagccccattaaaaaaaaaa

SEQ ID NO: 706 - DNA, 134 bp, Homo sapiens
  misc_feature (1)...(134): n = A,T,C or G
ggtgagcggcctccacccaaacgactnactanggaanctntgcnaaattattnaaaagaacnangggatccaacagtgctcattcttcatgcaaaagttgcacagaagtcttacggaaatgaaaaacgattttt

SEQ ID NO: 707 - DNA, 119 bp, Homo sapiens
gaactgagatcctgtctctacagagaaaacggccccgaaacggaagttccccagccctccacattcctccaatggccattcgccccaagactcatccacgagccccattaaaaaaaaaa

SEQ ID NO: 708 - DNA, 110 bp, Homo sapiens
cctgtctctacagcagaaaacggccccgaaacggaagttccccagccctccacattcctccaatggccattcgccccaagactcatccacgagccccattaaaaaaaaaa

SEQ ID NO: 709 - DNA, 118 bp, Homo sapiens
agactgagacctgtctctacagagaaaacggccccgaaacggaagttccccagccctccacattcctccaatggccattcgccccaagactcatccacgagccccattaaaaaaaaaa

SEQ ID NO: 710 - DNA, 101 bp, Homo sapiens
ggtaacatttcacttgttgcctttccagtttcaagcaccaactcaccaacaaagattttaccgaaaaccttagggccaataaatgtgaatgttggacccct

SEQ ID NO: 711 - DNA, 140 bp, Homo sapiens
  misc_feature (1)...(140): n = A,T,C or G
gaatcccacattgccttcactcacangatctgncanccagagccccgagtcccccangcccantgngcagttcaaatataanaccgcgcataacaaganangtgaagcaccatgaaactcttgtttgattaaaaaaaaaa

SEQ ID NO: 712 - DNA, 161 bp, Homo sapiens
gactgaggctgaagaggagaatcccagattgccttcactcacaagatctggcaagccagagccccgagtcccccaagcccagtgagcagttcaaatataaaaccgcacataacaagaaaagtgaagcaccatgaaactcttgtttgattagaaaaaaaaaa

SEQ ID NO: 713 - DNA, 152 bp, Homo sapiens
  misc_feature (1)...(152): n = A,T,C or G
taccctgaggtggttncnactggggncaggagtgctttgcagacagaagacctgcaggaaaatgccgantgatgacttgtgttggttcaccctccctgctcccgncttcttttaaaacaantaaacatgantggaaacgcaagaaaaaaaaa

SEQ ID NO: 714 - DNA, 143 bp, Homo sapiens; identical to SEQ ID NO: 520

SEQ ID NO: 715 - DNA, 144 bp, Homo sapiens
  misc_feature (1)...(144): n = A,T,C or G
ggagaatcccagattgccttcactcacaagatctggcangccagagccccgagtcccccaagcccagtgagcagttcaaatataaaaccgcacataacaagaaaagtgaagcaccatgaaactcttgtttgattaaaaaaaaaa

SEQ ID NO: 716 - DNA, 189 bp, Homo sapiens
  misc_feature (1)...(189): n = A,T,C or G
gactgagcttggctgaanaggaaataaaaactgagcangaggnggtggagggaatggatatctctactcgctccaaagatcctgtctctacagagaaaacggccccgaaacggaagttccccagccctccacattcctccaatggccattcgccccaagactcatccacgagccccattaaaaaaaaaa

SEQ ID NO: 717 - DNA, 109 bp, Homo sapiens
  misc_feature (1)...(109): n = A,T,C or G
acactgtgttgaagagggggaggcctcggacttctcgctgtcctggangtaatgctaaatagcgccgggatnctgacagggggntacacggataattggacataccaac

SEQ ID NO: 718 - DNA, 159 bp, Homo sapiens
  misc_feature (1)...(159): n = A,T,C or G
acactgaggctgatgaggacaatcccagattgccttcactcacaagatctggcagccagagccccgagtcccccangcccagtgagcagttcaaatattaaaccgcacataacaagaaaagtgaagcaccatgaaactcttgtttgattaaaaaaaaaa

SEQ ID NO: 719 - DNA, 163 bp, Homo sapiens
  misc_feature (1)...(163): n = A,T,C or G
tgaaaccctgaggctgttgnggacaatcccagattgccttcactcacaagatctggcngccagagccccgngtcccccaagcccagtgagcagttcaaatataanaccgcacataacaagaaaagtgaagcaccatgaaactcttgtttgattaaaaaaaaaa

SEQ ID NO: 720 - DNA, 175 bp, Homo sapiens
  misc_feature (1)...(175): n = A,T,C or G
aaaaactgaaaaagcttngaatggctgnccaggagaatcccanattggcttcactcacaagatctggcagccagagccccgagtcccccaagcccagtgagcagttcaaatataaaaccgcacataacaagaaaagttgaagcaccatgaaactcttgtttgattaaaaaaaaaa

SEQ ID NO: 721 - DNA, 134 bp, Homo sapiens
atattgccttcctcacaagatctggcagccagagccccgagtcccccaagcccagtgagcagttcaaatataaaaccgcacataacaagaaaagtgaagcaccatgaaactcttgtttgattgaaaaaaaaaaa

SEQ ID NO: 722 - DNA, 143 bp, Homo sapiens
agagaatcccagattgccttcactcacaagatctggcagccagagccccgagtcccccaagcccagtgggcagttcaaatataaaaccgcacataacaagaaaagtgaagcaccatgaaactcttgtttgattaaaaaaaaaa

SEQ ID NO: 723 - DNA, 163 bp, Homo sapiens
aagaactgaggctgaagaggagaatcccagattgccttcactcacaagatctggcagccagagccccgagtcccccaagcccagtgagcagttcaaatataaaaccgcacataacaagaaaagtgaagcaccatgaaactcttgtttgattgaaaaaaaaaaa

SEQ ID NO: 724 - DNA, 143 bp, Homo sapiens; identical to SEQ ID NO: 640

SEQ ID NO: 725 - DNA, 104 bp, Homo sapiens
ccggagccccgagtcccccaagcccagtgagcagttcaaatataaaaccgcacataacaagaaaagtgaagcaccatgaaactcttgtttgattaaaaaaaaaa

SEQ ID NO: 726 - DNA, 157 bp, Homo sapiens
ctgaggctgaagaggagaatcccagattgccttcactccaagatctggcagccagagccccgagtcccccaagcccagtgagcagttcaaatataaaaccgcacataacaagaaaagtgaagcaccatgaaactcttgtttgattgaaaaaaaaaaa

SEQ ID NO: 727 - DNA, 152 bp, Homo sapiens
atgctgaatagagaatcccagattgccttcactcacaagatctggcagccagagccccgagtcccccaagcccagtgagcagttcaaatataaaaccgcacataacaagaaaagtgaagcaccatgaaactcttgtttgattaaaaaaaaaa

SEQ ID NO: 728 - DNA, 264 bp, Homo sapiens
  misc_feature (1)...(264): n = A,T,C or G
gactgaggtaacattncacttgttgcctttcngnttcaagcaccaactcaccaacnggagattntancgaaaaccttacgggccagtaaatgtgaatgntggaccccnangctgntgnctgcaccccagtgaactgangcattcanggagagaannganngggaatncttntacccctgcacccgcaatggtcactcagactcacatagctgaggctgctggctgggttcccagtaaacgaagcaaaaaaggagaaaaaaaaaa

SEQ ID NO: 729 - DNA, 109 bp, Homo sapiens
gactgaggtaacatttcacttgttgcctttccagtttcaagcaccaactcaccaacaaagattttaccgaaaaccttagggccaataaatgtgaatgttggaccccaaa

SEQ ID NO: 730 - DNA, 132 bp, Homo sapiens
  misc_feature (1)...(132): n = A,T,C or G
attgccttcactcacatggatctggcagccagagccccgagtcccccaagcccantgagcanttcttatataaaaccgcacataacaagaaaagtgaagcaccatgaaactcttgtttgattaaaaaaaaaa

SEQ ID NO: 731 - DNA, 118 bp, Homo sapiens; identical to SEQ ID NO: 504

SEQ ID NO: 732 - DNA, 195 bp, Homo sapiens
  misc_feature (1)...(195): n = A,T,C or G
ccttagggccaataantgtgaatgttggaccccaaatgattattaagcacnctcgcacagaattgccaatctccagaagtgttcngattgggaatccatntacccctgntcccgnaatggtcnntcngactcacatanctgaggctgctggctgggttcccaagtatacgaagcanantaggaaaaaaattaaaa

SEQ ID NO: 733 - DNA, 130 bp, Homo sapiens
  misc_feature (1)...(130): n = A,T,C or G
catattgtcttcactcacaagatctggcagccagagccccgagtcccccangcccagtgagcanntcaaatatnaaaccgcacataacaagaaaagtgaagcaccatgaaactcttgtttgattaaaaaa

SEQ ID NO: 734 - DNA, 126 bp, Homo sapiens
  misc_feature (1)...(126): n = A,T,C or G
gtcacttccagagggacgggcatcctnttctgacctctgaggacattgtacatgcatggtgcatananttacatgcaagcaaacgcctgtacacgtaaaataagtaataaaagtctttaacacaaa

SEQ ID NO: 735 - DNA, 189 bp, Homo sapiens; identical to SEQ ID NO: 353

SEQ ID NO: 736 - DNA, 127 bp, Homo sapiens
tttgaaacactgaggtgatgaagtctcgatcgctagacgggagatgctgccaagtgccccagacgggatcaagactccaatgacagccataagattccctaaagctaagacactgcaaaaaaaaaaa

SEQ ID NO: 737 - DNA, 189 bp, Homo sapiens
agactgacttggctgaagaggaaataaaaactgagcaggaggtggtggagggaatggatatctctactcgctccaaagatcctgtctctacagagaaaacggccccgaaacggaagttccccagccctccacattcctccaatggccattcgccccaagactcatccacgagccccattaaaaaaaaaa

SEQ ID NO: 738 - DNA, 150 bp, Homo sapiens
  misc_feature (1)...(150): n = A,T,C or G
agcactgaggctgaanatgagnatcccanattgccttcactcacaagatctggcagccagagccccgagtcccccaagcccagtgagcagttcaaatataaaaccgcacataacaagaaaagtgaagcaccatgaaactcttgtttgatt

SEQ ID NO: 739 - DNA, 108 bp, Homo sapiens
gccagagccccgagtcccccaagcccagtgagcagttcaaatataaaaccgcacataacaagaaaagtgaagcaccatgaaactcttgtttgattaaaaaaagaagaa

SEQ ID NO: 740 - DNA, 160 bp, Homo sapiens
  misc_feature (1)...(160): n = A,T,C or G
gactgaggctgaagaggagaatcccagattgccttnnctcacaagatctggcagccagagccccgagtcccccaagcccagtgagcagttcaaatataaaaccgcacataacaagaaaagtgaagcaccatgaaactcttgtttgattgaaaaaaaaaaa

SEQ ID NO: 741 - DNA, 127 bp, Homo sapiens
  misc_feature (1)...(127): n = A,T,C or G
tctctactcgctccaaagatcctgtntntacagagaaaacggccncgaaanggaagttccccngccctncacattcntncaatggccattcgccccatgactcatccacgggccccaaaaaaaaaaa

SEQ ID NO: 742 - DNA, 119 bp, Homo sapiens
  misc_feature (1)...(119): n = A,T,C or G
gactgagatcctgagtatacgagagannacggccccgaaacggaagttccccagccctccacattcctccaatggccattcgccccaagactcatccacgagccccattaaaaaaaaaa

SEQ ID NO: 743 - DNA, 107 bp, Homo sapiens
  misc_feature (1)...(107): n = A,T,C or G
tggtgtggagcagctctgtcatgtctccagcagagggcgcattntgcnttcttcagaactcaagaagcncangngtagcngacctgngaaactgggctaccctttga

SEQ ID NO: 744 - DNA, 356 bp, Homo sapiens
  misc_feature (1)...(356): n = A,T,C or G
accgctggcgaggaaaanctttaanggatgtgctacncagctgacncttgtgggnggacctnaanctnnctgnntgttngggagnatccctccaccnatgtttgggacaagaanaaggcnatgcctcnctgaaanttgaacaccctnaggagagtancaaggngtggccggcatgctgaacagatggaccgtggcgcccgaagtctcagcatcttcagntgattcttcagngtcncttgtgctggaatgaaggaggaggctgagtganancccnnacatgcatgcaataatcaaggggaagtgaacgtgccatctcctgaggtagantgggcccttntntcaaaaactaatgctag

SEQ ID NO: 745 - DNA, 157 bp, Homo sapiens
actgaggctgaagaggagaatcccagattgccttcactcacaagatctggcagccagagccccgagtcccccaagcccagtgagcagttcaaatataaaaccgcacataacaagaaaagtgaagcaccatgaaactcttgtttgattaaaaaaaaaa

SEQ ID NO: 746 - DNA, 184 bp, Homo sapiens
  misc_feature (1)...(184): n = A,T,C or G
ctgagcttggctgaagaggaaataaaaactgancaggaggtggtggagggaatggatatctctactcgctccaaagatcctgtctctacagagaaaacggccccgaaacggaagttccccagccctccacattcctccaatggccattcgccccaagactcatccacgagccccattaaatagc

SEQ ID NO: 747 - DNA, 154 bp, Homo sapiens
ctgagctttgaattctgaaaaagaagagtgtgaaacaagaagcaaagatcgggttggaagagggcaagaggaaagggggggatggaaggaaaccctgcagccaccaacacaataaacacaataaactgtatcctgaccacctcaaaaaaaaaaa

SEQ ID NO: 748 - DNA, 188 bp, Homo sapiens
actgagtttggctgaagaggaaataaaaactgagcaggaggtggtggagggaatggatatctctactcgctccaaagatcctgtctctacagagaaaacggccccgaaacggaagttccccagccctccacattcctccaatggccattcgccccaagactcatccacgagccccattaaaaaaaaaa

SEQ ID NO: 749 - DNA, 188 bp, Homo sapiens; identical to SEQ ID NO: 494

SEQ ID NO: 750 - DNA, 180 bp, Homo sapiens
  misc_feature (1)...(180): n = A,T,C or G
gcttgctgagagggaataaaactgagcaggagggnggnggggggaatggaatctctactcgctccaaagatcctgtctctacagagaaaacggccccgaaacggaagttccccagccctccacattcctccaatggccattcgccccaagactcatccacgagccccattaaaaaaaaaa

SEQ ID NO: 751 - DNA, 189 bp, Homo sapiens
  misc_feature (1)...(189): n = A,T,C or G
agactggcttggctgaagaggaaataaaaactgancaggaggtggtggagggaatggatatctctactcgctccaaagatcctgtctctacagagaaaacggccccgaaacggaagttccccagccctccacattcctccaatggccattcgccccaagactcatccacgagccccattaaaaaaaaaa

SEQ ID NO: 752 - DNA, 237 bp, Homo sapiens
  misc_feature (1)...(237): n = A,T,C or G
cagactgggtaacatttacttgttgcctttccagtttcaagcaccaactcnccaacaaagattttaccgaaaaccttagggccaatanatgtgaatgttggaccccaaatgattntaagcccaccgcanagaattgccaatncaggaagngttctgattgggaatccatatacccctgcacccgcaatggtcactcanactcacatagctaaggctgctggctgggttcccagtgat

SEQ ID NO: 753 - DNA, 151 bp, Homo sapiens
  misc_feature (1)...(151): n = A,T,C or G
actgagcaaacaggtggngganngaatggatatctctactcgctccaaaggatcctgtctctacagagaaaacggccccgaaacggaagttccccagccctccacattcctccaatggccattcgccccaagactcatccacgagccccat

SEQ ID NO: 754 - DNA, 182 bp, Homo sapiens; identical to SEQ ID NO: 289

SEQ ID NO: 755 - DNA, 150 bp, Homo sapiens
agaactgagattataagcacaccgcagagaattgccaattcaggaagtgttctgattgggaatccatatacccctgcacccgcaatggtcactcagactcacatagctgaggctgctggctgggttcccagtaaacgaagcaaaaaaaaa

SEQ ID NO: 756 - DNA, 156 bp, Homo sapiens
  misc_feature (1)...(156): n = A,T,C or G
tggggcgcagactggctttgaattcatganaaagaagagtgtgaaacaagaagcaaagatcgggttggaagagggcaagaggaaagggggggatggaaggaaaccctgnanccaccaacacaataaacacaataaactgtatcctgaccacctcaa

SEQ ID NO: 757 - DNA, 139 bp, Homo sapiens
  misc_feature (1)...(139): n = A,T,C or G
caccactgtggtctcagcaagtcagaagangtcagtcagctcccctggtggagctggagctacaagcaactgtgaaaactactctgcatattactcttcaaaagcagtaacaagtgatcttccacccctctgcctctcc

SEQ ID NO: 758 - DNA, 205 bp, Homo sapiens
  misc_feature (1)...(205): n = A,T,C or G
actgagagattcccaagagactnctggaactancaccantttttggcttgtacattgccaggcaggccattggaatcggagctgcagtcagattaaggccagcctggcctacattgagaaacctcattttgggaaagtgaaatactttgtcaattaacatgcagttggttcaataaagacttttggaaagtgtcaaaaaaaaaaa

SEQ ID NO: 759 - DNA, 166 bp, Homo sapiens
  misc_feature (1)...(166): n = A,T,C or G
tttttggcttgtacattgncangcangccattggaatcggagctgcantcanattaaggccagcctggcctacattgagaaacctcattttgggaaagtgaaatactttgtcaattaacatgcagttggttcaataaagacttttggaaagtgtcaaaaaaaaaaa

SEQ ID NO: 760 - DNA, 153 bp, Homo sapiens
  misc_feature (1)...(153): n = A,T,C or G
tgactttgaattctgaaaaataatagnntgaaacaagaattcaaatatnngtttggaagatgtcaaaaggaaagggggggatggaaggaaaccctgcagccaccaacacaataaacacaataaactgtatcctgaccacctcaaaaaaaaaaa

SEQ ID NO: 761 - DNA, 193 bp, Homo sapiens
  misc_feature (1)...(193): n = A,T,C or G
aggtactaccctgagctnacgcnataattttnttctttgacntactctcgcaggncattcnggtcnnanctgcaancaaannaaggccngcctggcctacattganaaacctcattttgggaaagtgaaatactttgtcaattaacatgcacttggttcaataaagacttttggaaagtgtcaaaaaaaaaaa

SEQ ID NO: 762 - DNA, 151 bp, Homo sapiens
  misc_feature (1)...(151): n = A,T,C or G
ttgtctcgcaggccattcnaatcggatcngcaatcanattaaggccagcctggcctacattgagaaacctcattttgggaaagtgaaatactttgtcaattaacatgcagttggttcaataaagacttttggaaagtgtcaaaaaaaaaaa

SEQ ID NO: 763 - DNA, 115 bp, Homo sapiens
gattaaggccagcctggcctacattgagaaacctcattttgggaaagtgaaatactttgtcaattaacatgcagttggttcaataaagacttttggaaagtgtcaaaaaaaaaaa

SEQ ID NO: 764 - DNA, 153 bp, Homo sapiens
  misc_feature (1)...(153): n = A,T,C or G
ttgaggaactctcaaaggtcggacnggacgnagcngcaaacaaantaangccagcctggcctacattgagaancctcattttgggaaagtgaaatactttgtcaattaacatgcagttggttcaataaagacttttggaaagtgtcaaaaaaa

SEQ ID NO: 765 - DNA, 119 bp, Homo sapiens
  misc_feature (1)...(119): n = A,T,C or G
gaggtcggagctgcagncagattaaggccagcctggcctacattgagaaacctcattttgggaaagngaaatactttgtcaattaacatgcagntggntcaataaagacttttggaaag

SEQ ID NO: 766 - DNA, 120 bp, Homo sapiens
  misc_feature (1)...(120): n = A,T,C or G
ggaagcagctgcaatcanatnaaggccagggctggcctacattgagaaacctnatttngggaaagagaaatactttgtcanttaanatgcagcnggttcaataaagacttttggaaagcg

SEQ ID NO: 767 - DNA, 149 bp, Homo sapiens
  misc_feature (1)...(149): n = A,T,C or G
tctcgcaggccattgcgggtcgganctgcnttcaaatnaaagncagnctggcctacattgaaaaacctcattttgggaaagtgaaataccttggcnattaacatgcagttgggtcaatnaagacttttggaaagtgtcaccaagaaaac

SEQ ID NO: 768 - DNA, 166 bp, Homo sapiens
  misc_feature (1)...(166): n = A,T,C or G
tttttggcttggacattgccangcaggccattggaatcggagctgcagtcagattaaggccagcctggcctacattgagaaacctcattttgggaaagtgaaatactttgtcaattaacatgcagttggttcaataaagacttttggaaagtgtcaaaaaaaaaaa

SEQ ID NO: 769 - DNA, 108 bp, Homo sapiens
gccagcctggcctacattgagaaacctcattttgggaaagtgaaatactttgtcaattaacatgcagttggttcaataaagacttttggaaagtgtcaaaaaaaaaaa

SEQ ID NO: 770 - DNA, 156 bp, Homo sapiens
  misc_feature (1)...(156): n = A,T,C or G
ttttggcttgtacattgccangcagccattggaatcggagctgccntcanantaangccagcctggcctacattgagaaacctcattttggnaaagtgaaanactttgncanttaanatgcagntggttcaataaagacttttggaaagtgtccta

SEQ ID NO: 771 - DNA, 214 bp, Homo sapiens
  misc_feature (1)...(214): n = A,T,C or G
ttgacagactgagataaattccnccnatgatctcctggaagctacacaatganttggcttgtcattgccaggcagccattctaatcgnagctgcnntcacattaangccannctgncctacattgagaaacctcattttgnnaaagtgaaatactttgtcaattaacatgcanttggttcaataaagacttttggaaagtgtcaaaaaaaaaaa

SEQ ID NO: 772 - DNA, 146 bp, Homo sapiens
  misc_feature (1)...(146): n = A,T,C or G
gcaggtcttgcaggacngagctgcagtcanattaaggccagnctggcctacactgagaaacctcattttgggaaagtgaaatactttgtcaattaacatgcagttggttcaataaagacttttggaaagtgtcccaaaaaaaaaaa

SEQ ID NO: 773 - DNA, 133 bp, Homo sapiens
  misc_feature (1)...(133): n = A,T,C or G
aggacggagctgcagncanatnaaggccagcctggcctacattgagaaacctcattttgggaaagtgaaatactttgtcaattaacatgcagttggttcaataaagacttttggaaagtgtcaaaaaaaaaaa

SEQ ID NO: 774 - DNA, 144 bp, Homo sapiens
  misc_feature (1)...(144): n = A,T,C or G
gcaggccattggaatcggagctgnaggcagattaaggccagcctggcctacattgagaaacctcattttgggaaagtgaaatactttgtcaattaacatgcagttggttcaataaagacttttggaaagtgtcaaaaaaaaaaa

SEQ ID NO: 775 - DNA, 171 bp, Homo sapiens
  misc_feature (1)...(171): n = A,T,C or G
caatatttttggcttggacattgccnngcaggccattggaatcggagctgcagtcagattaaggccagcctggcctacnttgagaaacctcattttgggaaagtgaaatactttgtcaattaacatgcagttggttcaataaagacttttggaaagtgtcaaaaaaaaaaa

SEQ ID NO: 776 - DNA, 104 bp, Homo sapiens
gcctggcctacattgagaaacctcattttgggaaagtgaaatactttgtcaattaacatgcagttggttcaataaagacttttggaaagtgtcaaaaaaaaaaa

SEQ ID NO: 777 - DNA, 143 bp, Homo sapiens
  misc_feature (1)...(143): n = A,T,C or G
gcagccattggaatcggagctgcagtcanattaaggccagcccggcctacattgagaaacctcattttgggaaagngaaatactttgtcaattaacatgcagttggttcaataaagacttttggaaagtgccaaaaaaaaaaa

SEQ ID NO: 778 - DNA, 155 bp, Homo sapiens
  misc_feature (1)...(155): n = A,T,C or G
acattgcctggcaagccattgcaatcgganctgcantcacgattaaggccngcctggcctacattganaaacctcnttttggnaaagtgaaatactttgtcaattaacatgcagttggttcaataaagacttttggaaagtgtcaaaaaaaaaaa

SEQ ID NO: 779 - DNA, 191 bp, Homo sapiens
  misc_feature (1)...(191): n = A,T,C or G
aggtactagcctgggctnaggccataatttctttttgnnnnnntctngcaggtcnttgcnggnggagctgcagtcaaatnaangccagcctggcctacattgagaaacctcattttgggaaagtgaaatactttgtcaattaacatgcagttggttcaataaagacttttggaaagtgtcaaaaaaaaaaa

SEQ ID NO: 780 - DNA, 199 bp, Homo sapiens
  misc_feature (1)...(199): n = A,T,C or G
ctgtagaaaaacccacaangaggtctactgtgagctaacgncagatttacgncttggacatngncangcagncattggaatcnggcagctgtcagtcaaaattaaggccagcctggcctacattgagaaacctcattttgggaaagngaaatactttgtcaattaacatgcagttggttcaataaagacttttggaaag

SEQ ID NO: 781 - DNA, 146 bp, Homo sapiens
  misc_feature (1)...(146): n = A,T,C or G
gcaggtcattgcgaggtcggagctgcanncanattaaggccagcctggcctacattgagaaacctcatttggggaaagtgaaatactttgtcaattaacatgcagttggttcaataaagacttttggaaagtgtcaaaaaaaaaaa

SEQ ID NO: 782 - DNA, 131 bp, Homo sapiens
  misc_feature (1)...(131): n = A,T,C or G
tcggagctgctagtcagattaaggccagcctggcctacattgagaaacctcattttgggaaagtgaaatactttgtcnattaacatgcagttggttcantaaagacttttggaaagtgtcaaaaaaaaaaa

SEQ ID NO: 783 - DNA, 154 bp, Homo sapiens
  misc_feature (1)...(154): n = A,T,C or G
gatctggactagcagaagtttttggcttgtacattgccaggcngccattgnaatcgacnctgcanncanattaaggccagcctggcctacattgagaaacctcattttggnaaagtgaaatactttgtcaattaacangcagttggttcaataa

SEQ ID NO: 784 - DNA, 180 bp, Homo sapiens
  misc_feature (1)...(180): n = A,T,C or G
tacctggaagctaactttnaggcttncattgccnggcagccattggaatcggagctgcagtcanattaaggccagcctggcctacattgagaaacctcattttgggaaagtgaaatactttgtcaattaacatgcagttggttcaataaagacttttggaaagngtcccaaaaaaaaaaa

SEQ ID NO: 785 - DNA, 205 bp, Homo sapiens
  misc_feature (1)...(205): n = A,T,C or G
ggggcccacgcctaggaggncgngngagaaagccattantgacgcgctaangaangcccancaatcnggcagacagggtaagngaaaagnggttngtgaaaaggngacncacnccatcactgatgctgtnacccatgcggnanaaggcctgggaagactggnacagtgagcctgnctaccngcatggctggcccttcctgaaggg

SEQ ID NO: 786 - DNA, 158 bp, Homo sapiens
  misc_feature (1)...(158): n = A,T,C or G
aactgaggttccaaaagtggcaggaagccccctggaccttnaccctnggcctgntgtccctncactacggcctaagancttggagtggggaggaccatggnggcatcnttgccaagggtctggacacangcatgctgganantggaccttgcttaaga

SEQ ID NO: 787 - DNA, 190 bp, Homo sapiens
  misc_feature (1)...(190): n = A,T,C or G
tactacctctagctaacgcgaataattttgttcttngacnttctctngcagccattgnaatcggagctgcagtcagattaaggccagcctggcctacattgagaaacctcattttgggaaagtgaaatactttgtcaattaacatgcagttggttcaataaagacttttggaaagtgtcaaaaaaaaaaa

SEQ ID NO: 788 - DNA, 117 bp, Homo sapiens
  misc_feature (1)...(117): n = A,T,C or G
caaattaaggccagcctggcctacattganaaacctcattttgggaaagtgaaatactttgtcaattaacatgcagttggttcaataaagacttttggaaagtgtcaaaaaaaaaaa

SEQ ID NO: 789 - DNA, 237 bp, Homo sapiens
  misc_feature (1)...(237): n = A,T,C or G
tttgaaaccactgcanaaaaatcccaagaaggaatcctgggaagctancanaagtttttggcttgtgacattgccaggcagncattggaatcggngntgcngncagattaaggncagcctggcctacattgagaaacctcattttgggaaagggaaatactttgtcaattaacatgcagttggttcaataaagacttttggaaagtgtcccctaactaaagggaaaaaaacttgttc

SEQ ID NO: 790 - DNA, 220 bp, Homo sapiens
  misc_feature (1)...(220): n = A,T,C or G
acactgagttttaagccaccgcagagaattgccaattcaggaagtgttctgattgggaatccatatacccctgcacccgcaatggtcactcagactcacatagctgaggctgctggctgggttcccagtgatcgaanccganctngagantttatngnctctggtttttcacattgtnnactnaacgngtgtgnaaannnnnatgggaaaggctcagacg

SEQ ID NO: 791 - DNA, 222 bp, Homo sapiens
  misc_feature (1)...(222): n = A,T,C or G
gcccttgacacactgagagggttcccctgaggactactntgaactaacgccanaattactntttggacattgnctcgcaggtcattngnnatcggaagctgcagtcaaattaaggccagcctggcctacattgagaaacctcattttgggaaagtgaaatactttgtcaattaacatgcaggnggttcaataaagacttttggaaagtgtcaaaaaaaaaaa

SEQ ID NO: 792 - DNA, 115 bp, Homo sapiens
  misc_feature (1)...(115): n = A,T,C or G
taaggccagcctggcctacattganantcctcattttgggaaagtgnaatactttgtcaattaacatgcacccaggttcaataaagacttttggaaagtgtcaaaaaaaaaacta

SEQ ID NO: 793 - DNA, 119 bp, Homo sapiens
  misc_feature (1)...(119): n = A,T,C or G
gcatattactcttcaaaagcagnaacangngatcttccacccctctgcctctcctntgcaanaacagcaggngctcttaacctgttaatcatggagcattttcactagcaaaaaaaaaa

SEQ ID NO: 794 - DNA, 147 bp, Homo sapiens
  misc_feature (1)...(147): n = A,T,C or G
gcaggccatgacgaataggcagctgcagtaaagattaaagccancctggcctacattgagaaacctcattttgggaaagtgaaatactttgtcaattaacatgcagttggttcaataaagacttttggaaagtgtcaaaaaaaaaaa

SEQ ID NO: 795 - DNA, 194 bp, Homo sapiens
  misc_feature (1)...(194): n = A,T,C or G
ctgggaagctaacgccaagntttacgttgttggacattgcctangcagncattgcaaatcggcagctgcagncagattaaggccagcctggcctacattgagaaacctcattttgggaaagtgaaatactttgtcaattaacatgcagttggttcaataaagacttttggaaagtgtcaacaaaaaattaaaaa

SEQ ID NO: 796 - DNA, 145 bp, Homo sapiens
  misc_feature (1)...(145): n = A,T,C or G
caggtccggacaggaagcatctgcaatnaaantaaggccagcctggcctacattgngaaacctcattttgggaaagtgaaatactttgtcaattaacatgcagttggttcaataaagacttttggaaagtgtctaaaaaaaaaaa

SEQ ID NO: 797 - DNA, 122 bp, Homo sapiens
ggtcggagctgcagtcagattaaggccagcctggcctacattgagaaacctcattttgggaaagtgaaatactttgtcaattaacatgcagttggttcaataaagacttttggaaagtgtca

SEQ ID NO: 798 - DNA, 114 bp, Homo sapiens
attaaggccagcctggcctacattgagaaacctcattttgggaaagtgaaatactttgtcaattaacatgcagttggttcaataaagacttttggaaagtgtcaaaaaaaaaaa

SEQ ID NO: 799 - DNA, 146 bp, Homo sapiens
gcaggccattgcgaggtcggagctgcagtcagattaaggccagcctggcctacattgagaaacctcattttgggaaagtgaaatactttgtcaattaacatgcagttggttcaataaagacttttggaaagtgtcaaaaaaaaaaa

SEQ ID NO: 800 - DNA, 132 bp, Homo sapiens
  misc_feature (1)...(132): n = A,T,C or G
ggtcggagctgcagtcanattaaggccagcctggcctacattgagaaacctcattttgggaaagtgaaatactttgtcaattaacatgcagttggttcaataaagacttttggaaagtgtcaaaaaaaaaaa

SEQ ID NO: 801 - DNA, 198 bp, Homo sapiens
  misc_feature (1)...(198): n = A,T,C or G
cactgaggaagtttgntgagcggcctcccccaaacgactcactanggnagctntgcgaaattattttaaagaacgaggggntcnaacagtgctcattcttcatgcaaaagntgcacagaagtcttacggaaatgaaaaacgatttttttgccctcctccttgtgtgtatcttatgggcagtggttggaaaaaaaaaaa

SEQ ID NO: 802 - DNA, 132 bp, Homo sapiens
  misc_feature (1)...(132): n = A,T,C or G
aatcggagctgcaatcagattaaggccagcctggcctacattgagaaacctcattttgggaaagtgaaatactttgtcaattaacatgcngnnggntcaataaagacttttggaaagtgtcaaaaaaaaaaa

SEQ ID NO: 803 - DNA, 134 bp, Homo sapiens
  misc_feature (1)...(134): n = A,T,C or G
ctcgcaggcatgacgggacggtactgcagtcanattaaggccagcctggcctacattgagaaacctcattttgggaaagtgaantactttgtcaattaacatgcagttggttcaataaagacttttggaaagtg

SEQ ID NO: 804 - DNA, 170 bp, Homo sapiens
caagtttttggcttggacattgccaggcaggccattggaatcggagctgcagtcagattaaggccagcctggcctacattgagaaacctcattttgggaaagtgaaatactttgtcaattaacatgcagttggttcaataaagacttttggaaagtgtcaaaaaaaaaaa

SEQ ID NO: 805 - DNA, 114 bp, Homo sapiens
  misc_feature (1)...(114): n = A,T,C or G
attaaggccagcctggcctacattganaancctcattttgggaaagtgaaatactttgtcaattgacatgcagttggttcaataaagacttttggaaagtgtcaaaaaaaaaaa

SEQ ID NO: 806 - DNA, 149 bp, Homo sapiens
  misc_feature (1)...(149): n = A,T,C or G
gatggagcttgccgctntgctgtttcgaanccatcacgtgnaacacctgcnaccttactcctagattatttggcgggaatcggtccntnccccttncttcataacggagtgctggaatagtaaaaattgaaccttgagcaaaaaaaaaa

SEQ ID NO: 807 - DNA, 168 bp, Homo sapiens
  misc_feature (1)...(168): n = A,T,C or G
atatttttgtttttgacnttgtctcgcaggtcttggaatcggaactncaancagattaaggccagcctggcctacattgggaaacctcattttgggaaagtgaggtactttgtcaattaacatgcagttggttcaataaagacttttggaaagtgtcaaaaaaaaaaa

SEQ ID NO: 808 - DNA, 134 bp, Homo sapiens
  misc_feature (1)...(134): n = A,T,C or G
ttgcctggcaagcattggaatcngagctgcgagtcagattaaggccagcctggcctacattgagaaacctcattttgggaaagcgaaatactttggcaattaacatncngctggttcaataaagacttttggaa

SEQ ID NO: 809 - DNA, 173 bp, Homo sapiens
  misc_feature (1)...(173): n = A,T,C or G
aggcctcctgaagctagcagaagtttttggcttgtacattntcaggcagccatnggaancggagctgcagtcaagttaaggccagcctggcctacattgagaaacctcattttgggaaagtgaaatactttgtcaattaacatgcagntggttnagtaaagacttttggaaag

SEQ ID NO: 810 - DNA, 102 bp, Homo sapiens
ccgtggattcttctacacacccatgtcccgccgcgaagtggaggacccacaaggtaagctctgctcctgaattaattctatcccaagtgagaaccacaaagg

SEQ ID NO: 811 - DNA, 152 bp, Homo sapiens
  misc_feature (1)...(152): n = A,T,C or G
ggggagcgtggattcttctacacacccatgtcccgccgcgaagtggaggacccacaagggacacanctggagctgngnggaggccagngagcnngtgaccttnacaccttggnactggnggngnnccagnggagncgtgtggttgtttatca

SEQ ID NO: 812 - DNA, 201 bp, Homo sapiens
  misc_feature (1)...(201): n = A,T,C or G
taacaccctgtcccgccgtgaagtggaggacccacaagtngcncaactggagctgggtggaggcccggnagcaggngaccttcagaccttgncactggangtggcccaccataagcgngncattntngaagagcgntncaccagcatntnctnnctntaccatctgngataactactggggctagacccaccactgacgca

SEQ ID NO: 813 - DNA, 103 bp, Homo sapiens
actgagaggttggagttttaatgattcaggcggctctggcggccaggctgggcgatatggtccgcacctagactgttgagctgggggtagaggaaaaaaaaaa

SEQ ID NO: 814 - DNA, 121 bp, Homo sapiens
  misc_feature (1)...(121): n = A,T,C or G
gagctctctgcttgctgctccagtcgctgtgcttgcctgctgtggngcctccctaccaggacagactcttgngcttttggaaccataagccaaataaacccttccttccataaaaaaaaaa

SEQ ID NO: 815 - DNA, 182 bp, Homo sapiens
  misc_feature (1)...(182): n = A,T,C or G
ttggctgaagaggaaataaaaactgagcaggaggnggnggagggaatggatatctctactcgctccaaagatcctgtctctacagagaaaacggccccgaaacggaagttccccagccctccacattcctccaatggccattcgccccaagactcatccaccgagccccattaaaaaaaaaa

SEQ ID NO: 816 - DNA, 119 bp, Homo sapiens
  misc_feature (1)...(119): n = A,T,C or G
actgagatcctgtctctacaggaggaaaacgggcccgaaacggnagttccccagccctncacattcctccaatggccattcgccccaagactcatccacgagccccattaaaaaaaaaa

SEQ ID NO: 817 - DNA, 116 bp, Homo sapiens
  misc_feature (1)...(116): n = A,T,C or G
aataaggccagcctggcctacattgagaaacctcgttttgggaaagtgaaatactttgtcaatntaacatgcaggtgggttcaataaagacttttggaaagtgttaaaaaaaaaaa

SEQ ID NO: 818 - DNA, 267 bp, Homo sapiens
  misc_feature (1)...(267): n = A,T,C or G
ggggagcgtggcttcttctacacacccatgtcccgccgngaagtggaggacccacaaggggcacaactgnagctgggnggaggcccgtgagcaggnnaccttcagaccttggcactggaggtggctccagccataancgtggcattgtatgatcaagtgctgnaccacanatnctgctccctctaccatagtgnagaactnctgcaactagacccaccactacccagtctacccctctncaatgaataaaacctttgaatgagcaca

SEQ ID NO: 819 - DNA, 185 bp, Homo sapiens
  misc_feature (1)...(185): n = A,T,C or G
gagcttggctgaagaggaaataaaaactgagcaggaggtggtggagggaatggatatctctactcgctccaaagatcctggntctacagagaaaacggccccgaaacggaagttccccagccctccacattcctccaatggccattcgccccaagactcatccacgagccccattaaaaaaaaaa

SEQ ID NO: 820 - DNA, 190 bp, Homo sapiens
gaactgagcttggctgaagaggaaataaaaactgagcaggaggtggtggagggaatggatatctctactcgctccaaagatcctgtctctacagagaaaacggccccgaaacggaagttccccagccctccacattcctccaatggccattcgccccaagactcatccacgagccccattaaaaaaaaaa

SEQ ID NO: 821 - DNA, 237 bp, Homo sapiens
  misc_feature (1)...(237): n = A,T,C or G
tgaggaacatttcacttgntgcctttccagnttcaagcnccaactcaccaacaaagattttaccgaaaaccttagggccaataaatgtgaatgttggaccccaaatgattataagcacaccgcanagaattgccaattcaggaagtgttctgattgggaatccatatacccctgcacccgcaatggncactcagactcacatagctgaggctgctggctgggttcccagtgaacgaa

SEQ ID NO: 822 - DNA, 189 bp, Homo sapiens; identical to SEQ ID NO: 353

SEQ ID NO: 823 - DNA, 256 bp, Homo sapiens
  misc_feature (1)...(256): n = A,T,C or G
ctataacccatcctagggttccgtntttgctactgtgggnngngtnggtgccgttaanacaagactgctctcttttcncnntnttaaanatanccatctnatcatcctcagatcaccatctaccactgaggcccagtgaagccagccttcctacncccagtgagatgaccctggaaacagactgatgccaacctnaatatnggggnttctggtgtgatgtgaatgaaaatatatcttgttcactgaaaaaaaaaaa

SEQ ID NO: 824 - DNA, 147 bp, Homo sapiens
  misc_feature (1)...(147): n = A,T,C or G
tcccactgaagaccanagaaagccagccttnctacgcccagtgngangaccctggaaacagactgatgccaacctgantatatgaacttctggtgtgatgtgaatgaaaatatatcttgttcactgagtttgctaaaaaaaaatgaa

SEQ ID NO: 825 - DNA, 131 bp, Homo sapiens
  misc_feature (1)...(131): n = A,T,C or G
cagcgtaatgaccaggataagccttggccaggaagcatgntacgtgtatcagcggacagcccagctccaccagtgcatttnaccaggcacaacacattatntgaagccnaccccctgacaaccaaaacact

SEQ ID NO: 826 - DNA, 158 bp, Homo sapiens
  misc_feature (1)...(158): n = A,T,C or G
gactgaggctgaagaggagaatcccagnttgccttcactcacaagatctggcagccagagccccgagtcccccaagcccagtgagcagttcaaatataaaaccgcacataacaagaaaagtgaagcaccatgaaactcttgtttgattaaaaaaaaaa

SEQ ID NO: 827 - DNA, 150 bp, Homo sapiens
  misc_feature (1)...(150): n = A,T,C or G
aactgaggtaacatttcacttgttgcctttccagtttcaagcaccaactcaccaacaaagattttaccgaaaaccttagggccantaaatgtgaatgttggaccccaaatggtaagaaaattattaaatttcagaattgaaaaaaaaaaa

SEQ ID NO: 828 - DNA, 162 bp, Homo sapiens
  misc_feature (1)...(162): n = A,T,C or G
tctgactgacgcctgaagtgctgagtcttgaaggtgaagcatgngggcccctgtnctggcanatggaaatcaacctcacctcctgggggacaggctgcccatctcgntgntaaatngactatgccaataaattaacatggctcactttcgaaaaaccaaaat

SEQ ID NO: 829 - DNA, 123 bp, Homo sapiens
  misc_feature (1)...(123): n = A,T,C or G
gtgagctctctgcttgctgctccagtcgctgtgcttgcctgctgtggtgcctccctaccaggacagactcttgngcttttggaaccataagccaaataaacccttccttccataaaaaaaaaa

SEQ ID NO: 830 - DNA, 178 bp, Homo sapiens
tgagatcctctcatcagcgctcagatcaccatctaccactgaggcccagtgaagccagccttcctacgcccagtgagatgaccctggaaacagactgatgccaacctgaatatatgaacttctggtgtgatgtgaatgaaaatatatcttgttcactgagtttgctataaaaaaaaaa

SEQ ID NO: 831 - DNA, 152 bp, Homo sapiens
tagcctagataccatctaccactgaggcccagtggagccagccttcctacgcccagtgagatgaccctggaaacagactgatgccaacctgaatatatgaacttctggtgtgatgtgaatgaaaatatatcttgttcactgaaaaaaaaaaa

SEQ ID NO: 832 - DNA, 150 bp, Homo sapiens
  misc_feature (1)...(150): n = A,T,C or G
ccccaatgaccccagacccgaangtaaaacatgtnnccccctgttctggcagatggaaatcaanntcaccnnctgggggacaggctgcccatctcgttgataaattgactatgccaataaattaacatggttcactttcaaaaaaaaaaa

SEQ ID NO: 833 - DNA, 109 bp, Homo sapiens
  misc_feature (1)...(109): n = A,T,C or G
acccctgttctggcatatggaaatcaacntcacnngctgggggacaggctgcccatctcgttgataaattgactatgccaataaattaacatggttcactttcaaaaaa

SEQ ID NO: 834 - DNA, 164 bp, Homo sapiens
  misc_feature (1)...(164): n = A,T,C or G
tcctggagctagaaaaantttttggnttgtacattgccaggcanncattggggtcggagctgcaagcatattaaggccagcctggcctanattganaaacctcattttgggaaagtgaaanactttgtcaattaacatgcagntnggntcaataaagacttttg

SEQ ID NO: 835 - DNA, 130 bp, Homo sapiens
  misc_feature (1)...(130): n = A,T,C or G
ttgaagcgaagcatctgggnccctgttctnnnagatggaaggaacctcanctcctgggggacaggctgcccatctcgttgataaattgactatgccaataaattaacatggttcactttcaaaaaaaaaa

SEQ ID NO: 836 - DNA, 122 bp, Homo sapiens
  misc_feature (1)...(122): n = A,T,C or G
agacaggcctgatttcctcatctgaccagntaaacactcagtaggatntcatcngaactactggaaccnacnagactctanggaaatcttctgccccttagnttattttttgttacagccct

SEQ ID NO: 837 - DNA, 146 bp, Homo sapiens
tgaggtggttgaagactgggggcagggagtgctttgcaaacagaagacccgcaggaaatgccgagtaatgacttgtgttggttcaccctccctgctcccgtcttcttttaaaacaaataaacagaatggaaacgcaaaaaaaaaaa

SEQ ID NO: 838 - DNA, 114 bp, Homo sapiens
  misc_feature (1)...(114): n = A,T,C or G
gcccctgttctggcanatggaaatcaanctcacctnctgggggacaggctgcccatctcgttgataaattgactatgccaataaattaacatggttcactttcaaaaaaaaaaa

SEQ ID NO: 839 - DNA, 192 bp, Homo sapiens
  misc_feature (1)...(192): n = A,T,C or G
gactgagggagttgggtgcgcgcnctcccccgggcgcctcactaggnaagctatgcgaaattatttaanagaacgaggngatcaaacagtgctcattcttcatgcaaaagttgcacagaagtcttacggaaatgaaaaacgatttttttgccctcctccttgtgtgnatcttatgggcagtggttggaaaaa

SEQ ID NO: 840 - DNA, 168 bp, Homo sapiens
  misc_feature (1)...(168): n = A,T,C or G
gactgagatctgactgaancctgagtgctcngtcntgaaggngaagcatgtgggcccctgntctggcagatggaantcaacctcacctcctggnggacaggctgcccatctcgttgataaattgactatgccaataaattaacatggttcactttcaaaaaagaaaaa

SEQ ID NO: 841 - DNA, 133 bp, Homo sapiens
  misc_feature (1)...(133): n = A,T,C or G
tgaaggcgaagcatgtggncccctgctctggcagatggaannnaanctcacctcctgggggacaggctgcccatctcgttgataaattgactatgccaataaattaacatggttcactttcaaaaaagaaaaa

SEQ ID NO: 842 - DNA, 163 bp, Homo sapiens
  misc_feature (1)...(163): n = A,T,C or G
tcttgactgaaacctcgaagtgctngagtcttgaaggngaancatgngggcccctgttctggcagatggaaatcangntcacctcctgggggacaggctgcccatctcgttgataaattgactatgccaataaattaacatggttcactttcaaaaaaaaaaa

SEQ ID NO: 843 - DNA, 132 bp, Homo sapiens
gactgaggtgtgagctctctgcttgctgctccagtcgctgtgcttgcctgctgtggtgcctccctaccaggacagactcttgtgcttttggaaccataagccaaataaacccttccttccataaaaaaaaaa

SEQ ID NO: 844 - DNA, 178 bp, Homo sapiens
gagatacatctcatcagcgctcagatcaccatctaccactgaggcccagtgaagccagccttcctacgcccagtgagatgaccctggaaacagactgatgccaacctgaatatatgaacttctggtgtgatgtgaatgaaaatatatcttgttcactgagtttgctataaaaaaaaaa

SEQ ID NO: 845 - DNA, 147 bp, Homo sapiens
  misc_feature (1)...(147): n = A,T,C or G
tctaccactgaggcccanngaagccagccttcctacncccagtgagatgaccctggaaacagactgatgccaacctgaatatatgaacttctggtgtgatgtgagngaaaatatatcttgttcactgagtttgctataaaaaaaaaa

SEQ ID NO: 846 - DNA, 225 bp, Homo sapiens
  misc_feature (1)...(225): n = A,T,C or G
gggctgagggagcagcctgggccnnggccatttctnatgcctgccctncgannttggctgnnccntnngntcagcctcagatcaccatctaccactgaggcccagtgaagccagccttcctacgcccagtgagatgaccctggaaacagactgatgccaacctgaatatatgaacttctggtgtgatgtgaatgaaaatatatcttgttcactgaaaaaaaaaaa

SEQ ID NO: 847 - DNA, 170 bp, Homo sapiens
  misc_feature (1)...(170): n = A,T,C or G
tctcatcagcctcaggatcaccatctaccactgaggcccagtgaagccagccttcctacgcccagtgagacgnncctggaaacagactgatgccaacctgaatatatgaacttctggtgtgatgtgaatgaaaatatatcttgttcactgagnttgctataaaaaaaaaa

SEQ ID NO: 848 - DNA, 147 bp, Homo sapiens
tctatagcctcagataccatctaccactgaggcccagtgaagccagccttcctacgcccagtgagatgaccctggaaacagactgatgccaacctgaatatatgaatttctggtgtgatgtgagtgaaaatatatcttgttcactga

SEQ ID NO: 849 - DNA, 268 bp, Homo sapiens
  misc_feature (1)...(268): n = A,T,C or G
caccatctaccactgtangcccagtgaagccagccttcctacgcccagtgagatgaccctggaaacagaccgatgccaacctgantatatgaacttntggngtgatgtgaatgaaaatatatcttgntcnctgccaannaagnccaaaagaanctanncttcctacgcncagtgagatgaccctggaaacagactgatgccaacctgaatatatgaacttctggcgtgatgtgaatgaaaatatatcttgttcactgaaaaaaaaaaa

SEQ ID NO: 850 - DNA, 177 bp, Homo sapiens
  misc_feature (1)...(177): n = A,T,C or G
tgagatcctctcatcagcctcangncaccatctaccactgangcccagtgaagccagccttcctacgcccagtgagatgaccctggnaacagactgatgccaacctgaatatatgaacttctggtgtgatgtgantganaatatatcttgttcactgagtttgctataaaaaaaaaa

SEQ ID NO: 851 - DNA, 153 bp, Homo sapiens
taagcctagataccatctaccactgaggcccagtgaagccagccttcctacgcccagtgagatgaccctggaaacagactgatgccaacctgaatatatgaacttctggtgtgatgtgaatgaaaatatatcttgctcactgaaaaaaaaaaa

SEQ ID NO: 852 - DNA, 132 bp, Homo sapiens
  misc_feature (1)...(132): n = A,T,C or G
cttgataccatctaccactgnggcccagngaagccagccttcctacgcccagtgagangaccctggaaacagactgatgccaacctgaatatatgaacttctggngcgatgngaatgaaaatatatcttgtt

SEQ ID NO: 853 - DNA, 141 bp, Homo sapiens
ccctctccacctgaggcccagtgaagccagccttcctacgcccagtgagatgaccctggaaacagactgatgccaacctgaatatatgaacttctggtgtgatgtgaatgaaaatatatcttgttcactgaaaaaaaaaaa

SEQ ID NO: 854 - DNA, 159 bp, Homo sapiens
gcctagataccatctaccactgaggcccagtgaagccagccttcctacgcccagtgagatgaccctggaaacagactgatgccaacctgaatatatgaacttctggtgtgatgtgaatgaaaatatatcttgttcactgagtttgctataaaaaaaaaa

SEQ ID NO: 855 - DNA, 148 bp, Homo sapiens
  misc_feature (1)...(148): n = A,T,C or G
atcaccatctaccactgaggcccagtgaagccagccttcctacgcccagtgagatgaccctggnaaacagactgatgccaacctgaatatatgaacttctgggtgtgatgngaatgaaaatatatcttgttcactgagaaaaaaaaaa

SEQ ID NO: 856 - DNA, 109 bp, Homo sapiens
  misc_feature (1)...(109): n = A,T,C or G
acatgtgggcccctgttctggcncatggaaatcanggnganntcctgggggacaggctgcccatctcnntnataaattgactatgccaataaattaacatggttcaaaa

SEQ ID NO: 857 - DNA, 128 bp, Homo sapiens
  misc_feature (1)...(128): n = A,T,C or G
tgaaggcgaagcatgtggncccctgntctggcagatggaanncaanctcacctcctgggggacaggctgcccatctcgntgataaattgactatgccaataccatnaacatggttcaaaaaaagaaaa

SEQ ID NO: 858 - DNA, 132 bp, Homo sapiens
  misc_feature (1)...(132): n = A,T,C or G
gactgaggtgggagctctctgcttgctgntccagtcgctgtgcttgcctgctgtggggcctccctaccaggacagactcttgggcttnnggnaccataagccaaataaacccttccttccataaaaaaaaaa

SEQ ID NO: 859 - DNA, 150 bp, Homo sapiens
  misc_feature (1)...(150): n = A,T,C or G
taagcctagataccatctaccactgaggcccagtgaagccagccttnctacgcccagngagatgaccctggaaacagactgatgccaacctgaatatatgaacttctggtgtgatgngaatgaaaatatatcttgttcactgagaaaaaa

SEQ ID NO: 860 - DNA, 174 bp, Homo sapiens
gactgaggatcctctcatgcagcctcaggacaccatctaccactgaggcccagtgaagccagccttcctacgcccagtgagatgaccctggaaacagactgatgccaacctgaatatatgaacttctggtgtgatgtgaatgaaaatatatcttgttcactgagaaaaaaaaaa

SEQ ID NO: 861 - DNA, 170 bp, Homo sapiens
tctcatcagcctcaggatcaccatctaccactgaggcccagtgaagccagccttcctacgcccagtgagatgaccctggaaacagactgatgccaacctgaatatatgaacttctggtgtgatgtgaatgaaaatatatcttgttcactgagtttgctataaaaaaaaaa

SEQ ID NO: 862 - DNA, 156 bp, Homo sapiens
taagcctcagatcaccatctaccactgaggcccagtgaagccagccttcctacgcccagtgagatgaccctggaaacagactgatgccaacctgaatatatgaacttctggtgtgatgtgaatgaaaatatatcttgttcacctgaaaaaaaaaaa

SEQ ID NO: 863 - DNA, 129 bp, Homo sapiens
gaagccagccttcctacgcccagtgagatgaccctggaaacagactgatgccaacctgaatatatgaacttctggtgtgatgtgaatgaaaatatatcttgttcactgagtttgctataaaaaagaaaa

SEQ ID NO: 864 - DNA, 134 bp, Homo sapiens
  misc_feature (1)...(134): n = A,T,C or G
ctcaagacaccatctancactgtangcccantgaagccagccttcctacgcccagngagatgaccctggaaacagactgatgccaacctgantatatnaacttctgggngtgatgtgaatgaaaatatatcttg

SEQ ID NO: 865 - DNA, 154 bp, Homo sapiens
  misc_feature (1)...(154): n = A,T,C or G
taagcctagatcaccatctaccactgaggcccagngaagccagccttcctacgcccagtgagatgaccctggaaacagactgatgccaacctgaatatatgaacttctggtgtgatgtgaatgaaaatatatcttgttcactgaaaaaaaaaaa

SEQ ID NO: 866 - DNA, 146 bp, Homo sapiens
  misc_feature (1)...(146): n = A,T,C or G
actgagatctgctgaagcctgaacngctgagncttgaaggggaancntgngggcccctgttctggcagatggaaatcaaccncacctnctggnggacaggctgaccatctngntgataaatngactatgccaataaattaacatgg

SEQ ID NO: 867 - DNA, 167 bp, Homo sapiens
tctatagcctcagatcaccatctaccactgaggcccagtgaagccagccttcctacgcccagtgagatgaccctggaaacagactgatgccaacctgaatatatgaacttctggtgtgatgtgaatgaaaatatatcttgttcactgagtttgctataaaaaaaaaa

SEQ ID NO: 868 - DNA, 161 bp, Homo sapiens
ctctcatcagcctcagatcaccatctaccactgaggcccagtgaagccagccttcctacgcccagtgagatgaacctggaaacagactgatgccaacctgaatatatgaacttctggtgtgatgtgaatgaaaatatatcttgttcactgaaaaaaaaaaa

SEQ ID NO: 869 - DNA, 159 bp, Homo sapiens
tctatacgcctcagatcaccatctaccactgaggcccagtgaagccagccttcctacgcccagtgagatgaccctggaaacagactgatgccaacctgaatatatgaacttctggtgtgatgtgaatgaaaatatatcttgttcactgaaaaaaaaaaa

SEQ ID NO: 870 - DNA, 151 bp, Homo sapiens
  misc_feature (1)...(151): n = A,T,C or G
gcctagataccatctaccactgaggcccagtgaagccagccttnctacgcccagtgagatgaccctggaaacagactgatgccaacctgaatatatgaacttctggtgtgatgtgaatgaaaatatatcttgttcactgagaaaaaaaaaa

SEQ ID NO: 871 - DNA, 152 bp, Homo sapiens
  misc_feature (1)...(152): n = A,T,C or G
ctcaagatcatcatctaccactgaggcccantgaagccagccttcctacgcccantgagatgaccctggaaacagactgatgccaacctgantatatgaacttntggngtgatgtgaatgaaaatatatcttgttcactgagaaaaaaaaaa

SEQ ID NO: 872 - DNA, 162 bp, Homo sapiens
  misc_feature (1)...(162): n = A,T,C or G
ctctcattagcctcagtatcaccntctaccactgaggcccagtgaagccagccttcctacgcccagtgagatgaccctggnaacagactgatgccaacctgaatatatgaacttctggtgtgatgtgaatgaaaatatatcttgttcactgaaaaaaaaaaa

SEQ ID NO: 873 - DNA, 159 bp, Homo sapiens
  misc_feature (1)...(159): n = A,T,C or G
tctcatcagcctcaggatcaccatctaccactgaggcccagtgaagccagccttcctacgcccagtgagatgannctggaaacagactgatgccaacctgaatatatgaacttctggtgtgatgtgaatgaaaatatatcttgttcactaaaaaaaaaa

SEQ ID NO: 874 - DNA, 194 bp, Homo sapiens
  misc_feature (1)...(194): n = A,T,C or G
ttttgtccgatccatgggggtgagggctcagatcaccatctaccactgaggcccagngaagccagccttcctacgcccagtgagatgaccctggaaacagactgatgccaacctgaatatatgaacttctggagtgatgtgaatgaagatatatcttgttcactgagtttgctatggggggggggagaacccaa

SEQ ID NO: 875 - DNA, 167 bp, Homo sapiens
tctatcagcctcagataccatctaccactgaggcccagtgaagccagccttcctacgcccagtgagatgaccctggaaacagactgatgccaacctgaatatatgaacttctggtgtgatgtgaatgaaaatatatcttgttcactgagtttgctataaaaaaaaaa

SEQ ID NO: 876 - DNA, 306 bp, Homo sapiens
  misc_feature (1)...(306): n = A,T,C or G
gctcaatgaaaagccttgtantaatancctgacatgccangtatgnagaganttgctatannnnatggagggcgcccgtgtgtgntgctgaggactntgtnnctgccggaannnggagngctntcntttnccgtttttanagagatncatntcatcagcctcagatcancatattaccanttgaggcccagngaagccagcctttnctacgcccagtgagatgaccctgggaaacagactgatgccaacctgaatatatgaacttnctggtgtgatggtgaangaaaaatatatcttgttcacttg

SEQ ID NO: 877 - DNA, 150 bp, Homo sapiens
  misc_feature (1)...(150): n = A,T,C or G
gcctagataccatctaccactgaggcccagtgaagccagccttcctacgcccagtgagatgancctggnaacagactgatgccaacctgaatatatgaacttctggtgtgatgtgaatgaaaatatatcttgttcactgaaaaaaaaaaa

SEQ ID NO: 878 - DNA, 132 bp, Homo sapiens
  misc_feature (1)...(132): n = A,T,C or G
tgcctagataccatctaccctgaggcccagtgaagccagccttcctacgcccantgagatgnccctggaaacagactgatgccaacctgnatatatgaacttctggtgtgatgtgaatgaaaatatatcttg

SEQ ID NO: 879 - DNA, 151 bp, Homo sapiens
tttctagataccatctaccactgaggcccagtgaagccagccttcctacgcccagtgagatgaccctggaaacagactgatgccaacctgaatatatgaacttctggtgtgatgtgaatgaaaatatatcttgttcactgagaaaaaaaaa

SEQ ID NO: 880 - DNA, 171 bp, Homo sapiens
  misc_feature (1)...(171): n = A,T,C or G
gactgagatcctctcattagcctcaggacaccatctaccactgaggcccanngaagccagccttcctacgcccagtgagatgaccctggaaacagactgatgccaacctgaatatatgaacttctggngtgatgtgaatgaaaatatatcttgttcactgagtttgctata

SEQ ID NO: 881 - DNA, 247 bp, Homo sapiens
  misc_feature (1)...(247): n = A,T,C or G
gcagggtgctcgtgtgtgctgctgaggnctgtgttnctgccngaagacnnngtnctatttttngccnttgttaaagagantnattncatcaanctnaaatnaccatggtacacactagnggcccanagangccantcttactacgcccaggtgaggtgaccctggaaacanactgatgcctgcctgaatatatgaacttctggtgtgatgtgaatgaaaatatatcttgttcactgaaaaaaaaaaa

SEQ ID NO: 882 - DNA, 161 bp, Homo sapiens
tctcatcagcctcagatcaccatctaccactgaggcccagtgaagccagccttcctacgcccagtgagatgaccctggaaacagactgatgccaacctgaatatatgaacttctggtgtgatgtgaatgaaaatatatcttgttcactgagaaaaaaaaaa

SEQ ID NO: 883 - DNA, 291 bp, Homo sapiens
  misc_feature (1)...(291): n = A,T,C or G
tacctgtacatgttcnagtatgaggnggacttcctataacccanggagggngccgtgtgtgctggtnnnggctttgctnntgncngncagacggagctgctctnttttgccgnncntaaaganatncntctnatcanccttaggancaccatcnacnactgangnccaggtgaagccagccttcctacgcccagaagagatgaccctggaaacagactgatgccaacctgaatatatgaacttctggtgtgatgtgaatgaaaatatatcttgttcactgaaaaaaaaaaa

SEQ ID NO: 884 - DNA, 188 bp, Homo sapiens
gactgagcttggctgaagaggaaataaaactgagcaggaggtggtggagggaatggatatctctactcgctccaaagatcctgtctctacagagaaaacggccccgaaacggaagttccccagccctccacattcctccaatggccattcgccccaagactcatccacgagccccattaaaaaaaaaa

SEQ ID NO: 885 - DNA, 130 bp, Homo sapiens
  misc_feature (1)...(130): n = A,T,C or G
tgaggcccagtgaatncagccttnctacnnccantgagatgaccctggtagacagactgatgccaacctgaatatatgaacttctggtgtgatgtgaatgaaaatatatcttgttcactgagtttgctat

SEQ ID NO: 886 - DNA, 124 bp, Homo sapiens
  misc_feature (1)...(124): n = A,T,C or G
gcccgccttcctcgcccagtgagatgaccctggnaacagactgatgccaacctgaatatattaacttctggtgtgatgtgaatgaaaatatatcttgttcaccgagtttgctataaaaaaaaaa

SEQ ID NO: 887 - DNA, 111 bp, Homo sapiens
  misc_feature (1)...(111): n = A,T,C or G
tgcccactgaatccagccttcctacgcccagngngatgancctgganacagactnatgccaacctgantatatgaacttntggngtgatgtgaatgaaaatatatcttgtt

SEQ ID NO: 888 - DNA, 125 bp, Homo sapiens
  misc_feature (1)...(125): n = A,T,C or G
acgccggccttcctacgcccagtgagatgaccctggaaacagactgatgccaacctgaatatatgaacttctggtgtgatgtgaatgaaaatatatcntgttcactgagtttgctataaaaaaaa

SEQ ID NO: 889 - DNA, 158 bp, Homo sapiens
tctatagcctcagatcaccatctaccactgaggcccagtgaagccagccttcctacgcccagtgagatgaccctggaaacagactgatgccaacctgaatatatgaacttctggtgtgatgtgaatgaaaatatatcttgttcactgaaaaaaaaaaa

SEQ ID NO: 890 - DNA, 163 bp, Homo sapiens
  misc_feature (1)...(163): n = A,T,C or G
ccatctcatcagcctcaggncaccatctaccactgaggcccagtgaagccagccttcctacgcccagtgagatgaccctggaaacagactgatgccaacctgaatatatgaacttctggtgtgatgtgaatgaaaatatatcttgttcactgaaaaaaaaaaa

SEQ ID NO: 891 - DNA, 248 bp, Homo sapiens
  misc_feature (1)...(248): n = A,T,C or G
gcttggggaactctcaaagggctgacaggnngcatcctgtngtganacacganaanatctcttttgccgcncctnngaanatgcatctnataanactcagatggacnatctaccactgaggcccatgtcntagncagncttgctacncccanaganatgaccctgnnancagactgatgccaacctgaatatatgaacttctggtgtgatgtgaatgaaaatatatcttgttcactgaaaaaaaaaaa

SEQ ID NO: 892 - DNA, 162 bp, Homo sapiens
  misc_feature (1)...(162): n = A,T,C or G
cctctcatcagcctcaggncaccatctaccactgaggcccagtgaagccagccttcctacgcccagtgagatgtccctggaaacagactgatgccaacctgaatatatgaacttctggtgtgatgtgaatgaaaatatatcttgttcactgaaaaaaaaaaa

SEQ ID NO: 893 - DNA, 169 bp, Homo sapiens
  misc_feature (1)...(169): n = A,T,C or G
tgagatcctttcatctgcctcagatnaccatctaccactgaggcccagctgaagccagccttnctactcccagtgagatgngnctggaaacagactgatgccaacctgaatatatgaacttctggtgtgatgtgaatgaaaatatatcttgttcactgaaaaaaaaaaa

SEQ ID NO: 894 - DNA, 179 bp, Homo sapiens
  misc_feature (1)...(179): n = A,T,C or G
gactgagacctctcattagcctcangacaccatctaccactgaggcccantgnagccagncttcctacgcccagngagatgaccctggaaacagactgatgccaacctgaatatatgaacttntggtgtgatgtcgaatgaaaatatatcttgttcactgagtttgctaaaaaaaaaaa

SEQ ID NO: 895 - DNA, 171 bp, Homo sapiens
  misc_feature (1)...(171): n = A,T,C or G
gactgagatcctctcatcagcctcaggncacctcctaccactgaggcccagtgaagccagccttcctacgcccagtgagatgaccctggaaacagactgatgccaacctgaatatatgaacttctggtgtgatgtgaatgaaaatatatcttgttcactgaaaaaaaaaaa

SEQ ID NO: 896 - DNA, 188 bp, Homo sapiens
  misc_feature (1)...(188): n = A,T,C or G
gactgagcttggctgaagaggaaataaaactgagcaggaggtggtggagggaatggatatctctactngctccaaagatccngnctctacagagaaaacggccccgaaacggaagttccccagccctccacattcctccaatggccattcgncccaagactcatccacgagccccattaaaaaaaaaa

SEQ ID NO: 897 - DNA, 158 bp, Homo sapiens; identical to SEQ ID NO: 889

SEQ ID NO: 898 - DNA, 150 bp, Homo sapiens
  misc_feature (1)...(150): n = A,T,C or G
tgaacttaaaaagatcttgcgctcggntgagctgnnccnccantnngggacccacactggggaaangcactncccgntgcccactgtgntgagaagagattcatgaggagtgaccatctcaccaancatgcccggtagtaacaccgagtt

SEQ ID NO: 899 - DNA, 113 bp, Homo sapiens
  misc_feature (1)...(113): n = A,T,C or G
gcccttcctacgcccagtgagatggncctggnaacagactgatgccaacctgaatatatgaacttctggngtgatgtgaatgaaatatntnttggtcactggaaaaaaaaaaa

SEQ ID NO: 900 - DNA, 114 bp, Homo sapiens
  misc_feature (1)...(114): n = A,T,C or G
ccagccttcctcgcccagtgagatgggcctggnaacagactgatgccaacctgaatatatgaacttctggtgtgatgtgaatgaaaatatatcttgttcactgaaaaaaaaaaa

SEQ ID NO: 901 - DNA, 145 bp, Homo sapiens
  misc_feature (1)...(145): n = A,T,C or G
accattctaccactgaggcccagtgaagctcagccttcctacncccantgagatgaccctgnnaacagactganagccaacctgnatatattgaacttctggtgngatgngaatgaaantatatcttgttcactgagaaaaaaaa

SEQ ID NO: 902 - DNA, 212 bp, Homo sapiens
  misc_feature (1)...(212): n = A,T,C or G
cgtttttgtacagatccatnggntggggctgngatgaccatctaccncctgaggcccagtgaatgccngncttcctacgcccagagngatgaccctggaaacagactgatgccaacctgaatatatgaacttctggngtgatgtgaatgaaaatatatccttgttcactgagtttgctatncntctagtgtttttattttgaaaaaaaaaaa

SEQ ID NO: 903 - DNA, 149 bp, Homo sapiens
  misc_feature (1)...(149): n = A,T,C or G
aaaaaccatctaccactgcatgcccagctgantccagncttcctacgcccanngagatgagcctggnaacagactgatgccaacctgaatatatgaacttctggtgtgatgtgaatgaaaatatatcttgttcactgagaaaaaaaaaa

SEQ ID NO: 904 - DNA, 120 bp, Homo sapiens
aagccagcccttccctacgcccagtgagatgaccctggaaacagactgatgccaacctgaatatatgaacttctggtgtgatgtgaatgaaaatatatcttgttcactgaaaaaaaaaaa

SEQ ID NO: 905 - DNA, 116 bp, Homo sapiens
  misc_feature (1)...(116): n = A,T,C or G
tagaggcccagtgaagccagccttcctaccgcccagtgagatgaccctggaaacagactgatgccaacctgaatatatgaaccttctggngggatgtgaatgaaaatatatcttgt

SEQ ID NO: 906 - DNA, 152 bp, Homo sapiens
cgaggtggtggagggaatggatatctctactcgctccaaagatcctgtctctacagagaaaacggccccgaaacggaagttccccagccctccacattcctccaatggccattcgccccaagactcatccacgagccccattaaaaaaaaaa

SEQ ID NO: 907 - DNA, 143 bp, Homo sapiens
  misc_feature (1)...(143): n = A,T,C or G
accatctaccactgcatgcccactgaatccagccttcctacacccagtgagnggagcctgganncagactnatgccaacctgaatatatgaacttctggtgtgatgtgaatgaaaatatatcttgttcactgaaaaaaaaaaa

SEQ ID NO: 908 - DNA, 121 bp, Homo sapiens
  misc_feature (1)...(121): n = A,T,C or G
ctaccactgaggcccagtgaagccanccttcctacgcccagtgngnngnccctggnaacagactgatgccaacctgaatatatgaacttctggncgtgatgagaatgaaaactatatcttg

SEQ ID NO: 909 - DNA, 142 bp, Homo sapiens
  misc_feature (1)...(142): n = A,T,C or G
ctagataccatctaccactgaggcccagtgaagccagccttnctacgcccagtgagatgaccctggnaacagactgatgccnacctgaatatatgaacttctggngtgatgtgaatgaaaatatatcttgttcactgaaaaa

SEQ ID NO: 910 - DNA, 156 bp, Homo sapiens
  misc_feature (1)...(156): n = A,T,C or G
tctatagcctcagataccatctccactgaggcccagtgaagccagccttcctacgcccagtgagatggnnntggnaacagtctgatgccaacctgaatatatgaacttctggtgtgatgtgaatgaaaatatatcttgttcactgaaaaaaaaaaa

SEQ ID NO: 911 - DNA, 159 bp, Homo sapiens
  misc_feature (1)...(159): n = A,T,C or G
tctatagcctcagatcaccatctaccactgaggcccagtgaagccagccttcctacncccagtgagatggccctggnnacagactgatgccaacctgaatatatgaacttctggtgtgatgtgaatgaaaatatatcttgttcactgaaagaaaaaaaa

SEQ ID NO: 912 - DNA, 116 bp, Homo sapiens
  misc_feature (1)...(116): n = A,T,C or G
cccctgaggcccagtgaagccagccttcctacacccantgagatggccctggnaacagactgatgccaacctnaatatatgaacttctggtgtgatgtgaatgaaaatatatcttg

SEQ ID NO: 913 - DNA, 193 bp, Homo sapiens
  misc_feature (1)...(193): n = A,T,C or G
catcttatatgcctgccctccgtttttgnacaanatccatggggntggggctnagatcaccatctaccactgaggcccantgaagccanccttcctactcccagtgagatgaccctggaaacagactgatgccaacctnaatgtatnnaactnctaggtgcagatgnagaatgaaaatatatctttgatcact

SEQ ID NO: 914 - DNA, 153 bp, Homo sapiens
  misc_feature (1)...(153): n = A,T,C or G
agccctttatcaccatctaccactgaggcccantgaanccanccttcctactcccantnanatgangctgggnncagactgatancaacctgaatatatgaacttctggtgtgatgtgaatgaaaatatatcttgttcactgaaaaaaaaaaa

SEQ ID NO: 915 - DNA, 142 bp, Homo sapiens
  misc_feature (1)...(142): n = A,T,C or G
cccatctaccactgaggcccantgaagccagccttnctacgcccagngagatgnccctggaaacagactgntgccaacctgaatatatgancttctggngtgatgtgaatgaaaanatatcttgttcactgaaaaaaaaaaa

SEQ ID NO: 916 - DNA, 142 bp, Homo sapiens
  misc_feature (1)...(142): n = A,T,C or G
ccctgaggcccagtgaagccagccttcctacgcccagtgagatgnccctggnaacagactgatgccaacctgaatatatgaacttctggtgtgatgtgaatgaaaatatatcttgttcactgagtttgctataaaaaaaaaa

SEQ ID NO: 917 - DNA, 299 bp, Homo sapiens
  misc_feature (1)...(299): n = A,T,C or G
tctcatcatcgctcaagatcaccatctancactgtangcccaatgaagccagccttcctacncccattnagatgnccctggaaacagactnatgccaacctnantatatnaacttntggtgtgaacgnnaatnaaaatatatcttgntcactnacactgatatccaaagaanccagccttcctactnnccaatgaagatgaccctggaaacagacttgatncncaacctgnngggngaacttctggtgtgatgtgaatgaaaatatatcttgttcactgagtttgctagaaaaaaaaaa

SEQ ID NO: 918 - DNA, 172 bp, Homo sapiens
tgagatccatctcatcagccctcaggatcaccatctaccactgaggcccagtgaagccatccttcctacgcccagtgagatgaccctggaaacagactgatgccaacctgaatatatgaacttctggtgtgatgtgaatgaaaatatatcttgttcactgagaaaaaaaaaa

SEQ ID NO: 919 - DNA, 160 bp, Homo sapiens
  misc_feature (1)...(160): n = A,T,C or G
tctcatcagcctcagatcaccatctaccactgaggcccagtgaagccagccttcctacccccagtgagatgagcctgggnacagactgatgccaacctgaatatatgaacttctggtgtgatgtgaatgaaaatatatcttgttcactgaaaaaaaaaaa

SEQ ID NO: 920 - DNA, 152 bp, Homo sapiens
  misc_feature (1)...(152): n = A,T,C or G
aagcctagataccatctaccactgangcccagtgaagccagccttcctacgcccagtgagatggncctggaaacagactgatgccaacctgaatatatgaacttctggtgtgatgtgaatgaaaatatatcttgttcactgaaaaaaaaaaa

SEQ ID NO: 921 - DNA, 121 bp, Homo sapiens
  misc_feature (1)...(121): n = A,T,C or G
gtgagccagccttcctacgcccantgagatggncctggaaacagactgatgccaacctgaatatatgaacttctggtgtgatgtgaatgaaaatatatcttgttcacctgaaaaaaaaaaa

SEQ ID NO: 922 - DNA, 117 bp, Homo sapiens
  misc_feature (1)...(117): n = A,T,C or G
cgcccttcctacgcccagtgagatgaccctggaaacagactgatgccaacctgaatatatgaaccttctggngtgattgtgaatgaaaatatntcttgtntcactgaaaaaaaaaaa

SEQ ID NO: 923 - DNA, 142 bp, Homo sapiens
ccctctccacctgaggcccagtgaagccagccttcctacgcccagtgagatgaccctggaaacagactgatgccaacctgaatatatgaacttctggtgtgatgtgaatgaaaatatatcttgttcactgagaaaaaaaaaa

SEQ ID NO: 924 - DNA, 161 bp, Homo sapiens
  misc_feature (1)...(161): n = A,T,C or G
ctctcatcagcctcaggncaccatctaccactgaggcccagtgaagccagccttcctacgcccagtgagatgaccctggaaacagactcatgccaacctgaatatatgaacttctggtgtgatgtgaatgaaaatatatcttgttcactgaaaaaaaaaaa

SEQ ID NO: 925 - DNA, 139 bp, Homo sapiens
  misc_feature (1)...(139): n = A,T,C or G
ccttctccctgaggcccagtgaagccagccttcctacgcccagtgagatgancctggaaacagactgatgccaacctgaatatatgaacttctggtgtgatgtgaatgaaaatatatcttgttcactgaaaaaaaaaaa

SEQ ID NO: 926 - DNA, 167 bp, Homo sapiens
tctatcagcctcagatcaccatctaccactgaggcctagtgaagccagccttcctacgcccagtgagatgaccctggaaacagactgatgccaacctgaatatatgaacttctggtgtgatgtgaatgaaaatatatcttgttcactgagtttgctaaaaaaaaaaa

SEQ ID NO: 927 - DNA, 167 bp, Homo sapiens
ctataagcctcagatcaccatctaccactgaggcccagtgaagccagccttcctacgcccagtgagatgaccctggaaacagactgatgccaacctgaatatatgaacttctggtgtgatgtgaatgaaaatatatcttgttcactgagtttgctaagaaaaaaaaa

SEQ ID NO: 928 - DNA, 150 bp, Homo sapiens
  misc_feature (1)...(150): n = A,T,C or G
tctcatcagcctcagntcaccatctaccactgaggcccagtgaagccagccttcctacgcccagtgagatgaccctggaaacagactgatgccaacctgaatatatgaacttctggtgtgatgtgaatgaaaatatatcttgttcactga

SEQ ID NO: 929 - DNA, 161 bp, Homo sapiens
  misc_feature (1)...(161): n = A,T,C or G
tctcatcagcctcagnncaccatctaccactgaggcccagtgaagccagccttcctacgcccagtgagatgaccctggaaacagactgatgccaacctgaatatatgaacttctggtgcgatgtgaatgaaaacatatcttgttcactgagaaaaaaaaaa

SEQ ID NO: 930 - DNA, 146 bp, Homo sapiens
  misc_feature (1)...(146): n = A,T,C or G
accacttgaggcccagtgaagccagccttcctacgcccagtgagatgancctggaaacagactgatgccaacctgattatatgaacntctgntgtgatntgaatgaaaatatatcttgntcactgagtttgctatcaaaaaaaaaa

SEQ ID NO: 931 - DNA, 170 bp, Homo sapiens
  misc_feature (1)...(170): n = A,T,C or G
actgagatcctctcatcagcctcaggatcaccntctncnctgaggcccagtgaagccagccttcctacgcccagtgagatgaccctggaaacagactgatgccaacctgaatatatgaacttctggtgtgatgtgaatgaaaatatatcttgttcactgaaaaaaaaaaa

SEQ ID NO: 932 - DNA, 121 bp, Homo sapiens
  misc_feature (1)...(121): n = A,T,C or G
catctccactgaggcccagtgaagccagccttcctacgcccagngagatgggnctggaaacagactgntgccaacctgaatatatgaacttctggtgngatgtgaatgaaaatatatcttg

SEQ ID NO: 933 - DNA, 178 bp, Homo sapiens
  misc_feature (1)...(178): n = A,T,C or G
gaactgagatccatctcatcagctctcagcacaccatctaccactgaggcccagtgaagccagccttcctacgcccagngagatgaccctggaaacagactgatgccaacctgaatatatgaacttctggngtgatgngaatgaaaatatatcttgttcactgagtttgctatagaaa

SEQ ID NO: 934 - DNA, 134 bp, Homo sapiens
gataccatctccacctgaggcccagtgaagccagccttcctacgcccagtgagatgaccctggaaacagactgatgccaacctgaatatatgaacttctggtgtgatgtgaatgaaaatatatcttgttcactg

SEQ ID NO: 935 - DNA, 162 bp, Homo sapiens
taagcctagataccatctaccactgaggcccagtgaagccagccttcctacgcccagtgagatgaccctggaaacagactgatgccaacctgaatatatgaacttctggtgtgatgtgaatgaaaatatatcttgttcactgagtttgctataaaaaaaaaa

SEQ ID NO: 936 - DNA, 142 bp, Homo sapiens
ccactgaggcccagtgaagccagccttcctacgcccagtgagatgaccctggaaacagactgatgccaacctgaatatatgaacttctggtgtgatgtgaatgaaaatatatcttgttcactgagtttgctaaaaaaaaaaa

SEQ ID NO: 937 - DNA, 179 bp, Homo sapiens
  misc_feature (1)...(179): n = A,T,C or G
gactgagacctctcataagcctcaggacaccatctaccactgaggcccagtgaagccagccttcctacgcccagtgagatgaccctggnaacagactgatgccaacctgaatatatgaacttctggngtgatgtgaatgaaaatatatcttgttcactgagtttgctataaaaaaaaaa

SEQ ID NO: 938 - DNA, 145 bp, Homo sapiens
gataccatctccacctgaggcccagtgaagccagccttcctacgcccagtgagatgaccctggaaacagactgatgccaacctgaatatatgaacttctggtgtgatgtgaatgaaaatatatcttgttcactgaaaaaaaaaaa

SEQ ID NO: 939 - DNA, 127 bp, Homo sapiens
  misc_feature (1)...(127): n = A,T,C or G
aatgccagccttcctacgcccatcnggacgacgntggagacagnctgangccaacctnaatatatgaacttctngngngatgngaatgaaaatatatcttgttcactgagtttgctatagaaaaaaa

SEQ ID NO: 940 - DNA, 161 bp, Homo sapiens
cctctatcagcctcagatcaccatctaccactgaggcccagtgaagccagccttcctacgcccagtgagatgaccctggaaacagactgatgccaacctgaatatatgaacttctggtgtgatgtgaatgaaaatatatcttgttcactgaaaaaaaaaaa

SEQ ID NO: 941 - DNA, 147 bp, Homo sapiens
  misc_feature (1)...(147): n = A,T,C or G
gacaccatctaccactgtangcccantgaagncagccttcctacgcccagngagatgaccctggnaacagactgatgccaacctgantatatgaacttntggtgagatgtgaangaaaatatatcttgnncactgagaaaaaaaaaa

SEQ ID NO: 942 - DNA, 157 bp, Homo sapiens
tctatagcctcagataccatctaccactgaggcccagtgaagccagccttcctacgcccagtgagatgaccctggaaacagactgatgccaacctgaatatatgaacttctggtgtgatgtgaatgaaaatatatcttgttcactgaaaaaaaaaaa

SEQ ID NO: 943 - DNA, 121 bp, Homo sapiens
  misc_feature (1)...(121): n = A,T,C or G
gcccagtgaagccagccttnctacacccagnagagatgancctgganacagactgatgccaacctgnntatntgaacttctggtgtgatagtgnatganaatatatcctctgttcactgat

SEQ ID NO: 944 - DNA, 149 bp, Homo sapiens
catctaccactgaggcccagtgaagccagccttcctacgcccagtgagatgaccctggaaacagactgatgccaacctgaatatatgaacttctggtgtgatgtgaatgaaaatatatcttgttcactgagtttgctataaaaaaaaaa

SEQ ID NO: 945 - DNA, 225 bp, Homo sapiens
  misc_feature (1)...(225): n = A,T,C or G
tgatcctgccgtgagaccngagtgctntcttttcgncgctantaannagatnnatancatganccnnanatgaccatctaccactgnangcccactgaagccagccttnctacgnccagtagagatgaccctgtgaacagactgatgccaacctgaatatatgaacttctggtgtgatgtgaatgaaaatatatcttgttcactgagtttgctataaaaaaaaaa

SEQ ID NO: 946 - DNA, 126 bp, Homo sapiens
ccaaaagaagccagccttcctacagcccagtgagatgaccctggaaacagactgatgccaacctgaatatatgaacttctggtgtgatgtgaatgaaaatatatcttgtccactgaaaaaaaaaaa

SEQ ID NO: 947 - DNA, 169 bp, Homo sapiens
  misc_feature (1)...(169): n = A,T,C or G
tctcatcagcctcaggncaccatctaccactgaggcccagtgaagccagccttcctacgcccagtgagatgaccctggaaacagactgatgccaacctgaatatatgaacttctggtgtgatgtgaatgaaaatatatcttgttcactgagtttgctataaaaaaaaaa

SEQ ID NO: 948 - DNA, 128 bp, Homo sapiens
  misc_feature (1)...(128): n = A,T,C or G
aggccccgtgaagccagccttcctacgcccagtgagatggncctggnaacagactgatgccaacctgaatatatgaacttctggtgtgatgtgaatgaaaatatatcttgttcactgaaaaaaaaaaa

SEQ ID NO: 949 - DNA, 162 bp, Homo sapiens
tctatagcctcagataccatctaccactgaggcccagtgaagccagccttcctacgcccagtgagatgaccctggaaacagactgatgccaacctgaatatatgaacttctggtgtgatgtgaatgaaaatatatcttgttcactgagtttgctatagaaaa

SEQ ID NO: 950 - DNA, 160 bp, Homo sapiens
  misc_feature (1)...(160): n = A,T,C or G
tctcatcagcctcaggncaccatctaccactgaggcccagtgaagccagccttcctacgcccagtgagatgaccctggaaacagactgatgccaacctgaatatatgaacttctggtgtgatgtgaacgaaaatatatcttgttcactgaaaaaaaaaaa

SEQ ID NO: 951 - DNA, 144 bp, Homo sapiens
  misc_feature (1)...(144): n = A,T,C or G
agctctcagcacaccatctaccactgaggcccagtgaagccagccttcctacgcccagnganatgaccctggagacagactgatgccaacctgactatatgancttntggngngatgngaatgaaaatatatcttggtcactga

SEQ ID NO: 952 - DNA, 166 bp, Homo sapiens
  misc_feature (1)...(166): n = A,T,C or G
tataaacctagatcaccatctaccactgaggcccagtgaagccagccttcctacgcccagtaagatgancctgggngcagactgatgccaacctgaatatatgaacttctggtgtgatgtgaaatgaaaatatatcttgttgactgagtttgctataaaaaaaaaa

SEQ ID NO: 953 - DNA, 125 bp, Homo sapiens
  misc_feature (1)...(125): n = A,T,C or G
tgaagccagccttcctacccccantgatatgaccctggnaacagactgatgccaacctgaatatatgaacttctggtgtgatgtgaatgaaaatatatcttgttcactgagtttgctataaaaaa

SEQ ID NO: 954 - DNA, 151 bp, Homo sapiens
gcctagatcaccatctaccactgaggcccagtgaagccagccttcctacgcccagtgagatgaccctggaaacagactgatgccaacctgaatatatgaacttctggtgtgatgtgaatgaaaatatatcttgttcactgaaaaaaaaaaa

SEQ ID NO: 955 - DNA, 131 bp, Homo sapiens
  misc_feature (1)...(131): n = A,T,C or G
actgaagccagccttcctacgcccagtganatgaccctgnnaacagactgatgccaacctgaatatatgaacttctggtgtgatgtgaatgaaaatatatcttgttcactgagtttgctataaaaaaaaaa

SEQ ID NO: 956 - DNA, 166 bp, Homo sapiens
  misc_feature (1)...(166): n = A,T,C or G
tctatagcctcagataccatctaccactgaggcccagtgaagccagccttcctacgcccagtgagatgnccctggaaacagactgatgccaacctgaatatatgaacttctggtgtgatgtgaatgaaaatatatcttgttcactgagtttgctataaaaaaaaaa

SEQ ID NO: 957 - DNA, 127 bp, Homo sapiens
gcccagtgaagccagccttcctacgcccagtgagatgaccctggaaacagactgatgccaacctgaatatatgaacttctggtgtgatgtgaatgaaaatatatcttgttcactgagaaaaaaaaaa

SEQ ID NO: 958 - DNA, 177 bp, Homo sapiens
  misc_feature (1)...(177): n = A,T,C or G
ctctcatcagcctaagaatcaccatntaccactggaggcccagtgaagccagccttcntacgcccagngagatgaccctggaaacagactgatgccaaccctggaatatatggaacttctggtgtgatgggaatgaaaatatntccttgttcactgagtttgctttaaaaaaaaaaa

SEQ ID NO: 959 - DNA, 215 bp, Homo sapiens
  misc_feature (1)...(215): n = A,T,C or G
tgttcctgccgccagacggtagtgctctcttttgccgttcttaangagatncatcatcatnagcctnagatcancatataccantgaggcccaagagaagccagccttcctacgcccagtgtgatgaccctggaaacagactgatgccaacctgaatatatgaacttctggtgtgatgtgaatgaaaatatatcttgttcactgaaaaaaaaaaa

SEQ ID NO: 960 - DNA, 151 bp, Homo sapiens
  misc_feature (1)...(151): n = A,T,C or G
atctcatcagcctcaggncaccatctaccactgaggcccagtgaagccagccttcctacgcccagtgagatgaccctggaaacagactgatgccaacctgaatatatgaacttctggtgtgatgtgaatgaaaatatatcttgttcactga

SEQ ID NO: 961 - DNA, 120 bp, Homo sapiens
  misc_feature (1)...(120): n = A,T,C or G
attgcagcacttcctacgcccngtgngntgaccctggaaacagactgatgccaacctgaatatatgaacttctggtgtgatgtgaatgaaaatatatcttgttcacctgaaaaaaaaaaa

SEQ ID NO: 962 - DNA, 126 bp, Homo sapiens
  misc_feature (1)...(126): n = A,T,C or G
gaagccagccttcctacgcccagtgagatgaccctggaaacagaccggangccaacctggaatatatngaacttctgggtgtngatgtgaatgaaaatatatccttgttcacctgaaaaaaaaaaa

SEQ ID NO: 963 - DNA, 153 bp, Homo sapiens
tagcctagatcaccatctaccactgaggcccagtgaagccagccttcctacgcccagtgagatgaccctggaaacagactgatgccaacctgaatatatgaacttctggtgtgatgtgaatgaaaatatatcttgttcactgaaaaaaaaaaa

SEQ ID NO: 964 - DNA, 174 bp, Homo sapiens
  misc_feature (1)...(174): n = A,T,C or G
accatctaccactgcngcccactgaanccagccttcctacgcccagtgagatgaccctggaaacagactgatgccaacctgaatatatgaacttctggtgtgatgtgaatgaaaatatatcttgttcactgagtttgctatacatttagtgtttttattttgtaaaaaaaaaaa

SEQ ID NO: 965 - DNA, 157 bp, Homo sapiens; identical to SEQ ID NO: 942

SEQ ID NO: 966 - DNA, 175 bp, Homo sapiens
  misc_feature (1)...(175): n = A,T,C or G
tgccaagacctccgtttttgttcagatccataaagcccaggcctcagatcaccatctaccacctgaggcccagngaagccagccttnctacgcccagtgagatgaccctggaaacagactgatgccaacctgantatatgaacttctggngtgangngaatgaaaatatatcttg

SEQ ID NO: 967 - DNA, 158 bp, Homo sapiens
  misc_feature (1)...(158): n = A,T,C or G
tcatgagcctcagaacaccatctaccactgaggcccagtgaagccaggcttcctacgcccagtgagatgancctggnaacagactgatgccaacctgaatatatgaacttccggtgtgatgtgaatgaaaatatatcttgttcactgaaaaaaaaaaa

SEQ ID NO: 968 - DNA, 156 bp, Homo sapiens
  misc_feature (1)...(156): n = A,T,C or G
atgactgctgaaaaaccatntaccactgcatgcccactgantgcagncttcctacgcccagtgagangaccctggtancanactgatgccaacctgaatatatgaacttctggtgtgatgtgaatgaaaatatatcttgttcactgaaaaaaaaaa

SEQ ID NO: 969 - DNA, 110 bp, Homo sapiens
gccttcactcccagtgagatgaccctggaaacagactgatgccaacctgaatatatgaacttctggtgtgatgtgaatgaaaatatatcttgttcactgaaaaaaaaaaa

SEQ ID NO: 970 - DNA, 158 bp, Homo sapiens; identical to SEQ ID NO: 889

SEQ ID NO: 971 - DNA, 168 bp, Homo sapiens
tctatcagcctcagatcaccatctaccactgaggcccagtgaagccagccttcctacgcccagtgagatgaccctggaaacagactgatgccaacctgaatatatgaacttctggtgtgatgtgaatgaaaatatatcttgttcactgggtttgctataaaaaaaaaa

SEQ ID NO: 972 - DNA, 334 bp, Homo sapiens
  misc_feature (1)...(334): n = A,T,C or G
cccagtgagatggcctggaaacagactgatgccnacctgaatatatgaacttctggngtgatgngantgaaaatatatcttgttcactgnanaacacaaactaangcctnagctgnannctgatttnaaaataacagacctgctnggcttgcaaggaggntcccngngggggaaactcantantagttcccctgtgccaccactctgggccttttaatgccaagaaagaattcanccgcagaanaccttggagatggtggcggacgtccagaatganggnggacttgcagaaaccatggacccccgcccacccaaacccttcccgtagcactaa

SEQ ID NO: 973 - DNA, 149 bp, Homo sapiens
taagataccatctaccacctgaggcccagtgaagccagccttcctacgcccagtgagatgaccctggaaacagactgatgccaacctgaatatatgaacttctggtgtgatgtgagtgaaaatatatcttattcactgaaaaaaaaaaa

SEQ ID NO: 974 - DNA, 103 bp, Homo sapiens
ctcccagtgagatgaccctggaaacagactgatgccaacctgaatatatgaacttctggtgtgatgtgaatgaaaatatatcttgttcactgaaaaaaaaaaa

SEQ ID NO: 975 - DNA, 153 bp, Homo sapiens
agcctagatcaccatctaccactgaggcccagtgaagccagccttcctacgcccagtgagatgaccctggaaacagactgatgccaacctgaatatatgaacttctggtgtgatgtgaatgaaaatatatcttgttcactgagaaaaaaaaaa

SEQ ID NO: 976 - DNA, 165 bp, Homo sapiens
  misc_feature (1)...(165): n = A,T,C or G
tataagcctagatcaccatctaccactgaggcccagtgaagccagccttcctacgcccagtgagatgaccctggaaacagactgatgccaacctgaatatgngaacttctggtgtgatgtgaatgaaaatatatcttgttcactgagtttgctataaaaaaaaaa

SEQ ID NO: 977 - DNA, 110 bp, Homo sapiens
gccttctctcccagtgagatgaccctggaaacagactgatgccaacctgaatatatgaacttctggtgtgatgtgaatgaaaatatatcttgttcactgaaaaaaaaaaa

SEQ ID NO: 978 - DNA, 117 bp, Homo sapiens
gccagccttcctaccgcccagtgagatgaccctggaaacagactgatgccaacctgaatatatgaacttctggtgtgatgtgaatgaaaatatatcttgttcactgaaaaaaaaaaa

SEQ ID NO: 979 - DNA, 101 bp, Homo sapiens
cccagtgagatgaccctggaaacagactgatgccaacctgaatatatgaacttctggtgtgatgtgaatgaaaatatatcttgttcactgaaaaaaaaaaa

SEQ ID NO: 980 - DNA, 159 bp, Homo sapiens
  misc_feature (1)...(159): n = A,T,C or G
tctatcagcctcagatcaccatctaccactgaggcccagtgaagccagccttcctacgcccagtgagatgnccctggaaacagactgatgccaacctgaatatatgaacttctggtgtgatgtgaatgaaaatatatcttgttcactgaaaaaaaaaaa

SEQ ID NO: 981 - DNA, 156 bp, Homo sapiens
tagataccatctaccactgaggcccagtgaagccagccttcctacgcccagtgagatgaccctggaaacagactgatgccaacctgaatatatgaacttctggtgtgatgtgaatgaaaatatatcttgttcactgagtttgctataaaaaaaaaa

SEQ ID NO: 982 - DNA, 159 bp, Homo sapiens
tctatagcctcagatcaccatctaccactgaggcccagtgaagccagccttcctacgcccagtgagatgaccctggaaacagactgatgccaacctgaatatatgaacttctggtgtgatgtgaatgaaaatatatcttgttcactgagaaaaaaaaaa

SEQ ID NO: 983 - DNA, 153 bp, Homo sapiens
tagcctagataccatctaccactgaggcccagtgaagccagccttcctacgcccagtgagatgaccctggaaacagactgatgccaacctgaatatatgaacttctggtgtgatgtgaatgaaaatatatcttgttcactgagaaaaaaaaaa

SEQ ID NO: 984 - DNA, 225 bp, Homo sapiens
  misc_feature (1)...(225): n = A,T,C or G
gttcctgccgccagacggtgngctctcttttnccgttacttaangngatgcatctcatcagnctnanatanaccatntaccantagaggcccagtagaagccgagccttcctacncccanggagatgaccctgnaaacagactgatgccaacctgaatatatgaacttctggtgtgatgtgaatgaaaatatatcttgttcactgagtatgctataaaaaaaaaa

SEQ ID NO: 985 - DNA, 174 bp, Homo sapiens
gatcctctcatcagcctcagatcaccatctaccactggggcccagtgaagccagccttcctacgcccagtgagatgaccctggaaacagactgatgccaacctgaatatatgaacttctggtgtgatgtgaatgaaaatatatcttgttcactgagtttgctataaaaaaaaaa

SEQ ID NO: 986 - DNA, 158 bp, Homo sapiens
tctatcagcctcagatcaccatctaccactgaggcccagtgaagccagccttcctacgcccagtgagatgaccctggaaacagactgatgccaacctgaatatatgaacttctggtgtgatgtgaatgaaaatatatcttgttcactgaaaaaaaaaa

SEQ ID NO: 987 - DNA, 153 bp, Homo sapiens
  misc_feature (1)...(153): n = A,T,C or G
gataccatctccactgaggcccagtgaagccagccttcctacgcccantgagangnncctggnaacagactgatgccaacctgaatatatgaacttctggtgtgatgtgaatgaaaatatatcttgttcactgagtttgctataaaaaaaaaa

SEQ ID NO: 988 - DNA, 166 bp, Homo sapiens
tctatagcctagatcaccatctaccactgaggcccagtgaagccagccttcctacgcccagtgagatgaccctggaaacagactgatgccaacctgaatatatgaacttctggtgtgatgtgaatgaaaatatatcttgttcactgagtttgctataaaaaaaaaa

SEQ ID NO: 989 - DNA, 150 bp, Homo sapiens
gcctagataccatctaccactgaggcccagtgaagccagccttcctacgcccagtgagatgaccctggaaacagactgatgccaacctgaatatatgaacttctggtgtgatgtgaatgaaaatatatcttgttcactgaaaaaaaaaaa

SEQ ID NO: 990 - DNA, 168 bp, Homo sapiens
tctatcagcctcagatcaccatctaccactgaggcccagtgaagccagccttcctacgcccagtgagatgaccctggaaacagactgatgccaacctgaatatatgaacttctggtgtgatgtgaatgaaaatatatcttgttcactgagtttgctataaaaaaaaaa

SEQ ID NO: 991 - DNA, 122 bp, Homo sapiens
  misc_feature (1)...(122): n = A,T,C or G
gagccagccttcctacgcccagngagatgaccctggaaacagactgangccaacctgnatatatgaacttctggtgtgatgtggntgaaaatatatctntgtcccactgcgcaaaaaaaaaa

SEQ ID NO: 992 - DNA, 121 bp, Homo sapiens
  misc_feature (1)...(121): n = A,T,C or G
gtgaagcctgcctttcctacgcccagngagatgaccctggaaacagactgatgccaacctgaatatatgaacttctggtgtgatgtgaatgaaaatatatcttgntcactgagtttgctaa

SEQ ID NO: 993 - DNA, 108 bp, Homo sapiens
  misc_feature (1)...(108): n = A,T,C or G
aagagatccatctcatcagcctcagatcaccatctaccnctgaggcccnantgangccagcctttctacgccnagtgagatgaccctggaaacagactgatgccaacc

SEQ ID NO: 994 - DNA, 129 bp, Homo sapiens
agaagccagccttcctacccccagtgagatgaccctggaaacagactgatgccaacctgaatatatgaacttctggtgtgatgtgaatgaaaatatatcttgttcactgagtttgctataaaaaaaaaa

SEQ ID NO: 995 - DNA, 182 bp, Homo sapiens
  misc_feature (1)...(182): n = A,T,C or G
gagatccatctcatcaagcctcagatnnccatctaccactgaggcccaagtagaagccagccttcctaccgcccaggtgagatgaccctggaaacagactgatgccaaccttgaatatatgaacttctggcgtgatgtgaatgaaaatatatcttgttcactgagtttgctaaaaaaaaaaa

SEQ ID NO: 996 - DNA, 164 bp, Homo sapiens
  misc_feature (1)...(164): n = A,T,C or G
ggcttgagtccagcccaatgacaccgncncccactgaggnccagtgaagccagncttcctacgcccagngagatgaccctggaaacagactgatgccaacctgaatatatgaacttctggtgtgatgtgaatgaaaatatatcttgttcactgaaaaaaaaaaa

SEQ ID NO: 997 - DNA, 166 bp, Homo sapiens
tctatagcctctgataccatctaccactgaggcccagtgaagccagccttcctacgcccagtgagatgaccctggaaacagactgatgccaacctgaatatatgaacttctggtgtgatgtgaatgaaaatatatcttgttcactgagtttgctataaaaaaaaaa

SEQ ID NO: 998 - DNA, 115 bp, Homo sapiens
  misc_feature (1)...(115): n = A,T,C or G
gcctttccctacgcccagcngagatgaccctggaaacagactgatgccaacctgaatatatgaacttctggtgtgatgtgaatgaaaatatatcttgntcactgaaaaaaaaaaa

SEQ ID NO: 999 - DNA, 170 bp, Homo sapiens
  misc_feature (1)...(170): n = A,T,C or G
gactgagaggcttgantccgcccngacaccgnctcccactggagnccanagaanccagccttnctacgcccagccgagatgaccctggaaacagactgatgccaacctgaatatatgaacttctggtgtgatgtgaatgaaaatatatcttgttcactgaaaaaaaaaaa

SEQ ID NO: 1000 - DNA, 161 bp, Homo sapiens
gcctagatcaccatctaccactgaggcccagtgaagccagccttcctacgcccagtgagatgaccctggaaacagactgatgccaacctgaatatatgaatttctggtgtgatgtgaatgaaaatatatcttgttcactgagtttgctatgaaaaaaaaaa

SEQ ID NO: 1001 - DNA, 161 bp, Homo sapiens
cctctatagcctcagatcaccatctaccactgaggcccagtgaagccagccttcctacgcccagtgagatgaccctggaaacagactgatgccaacctgaatatatgaacttctggtgtgatgtgaatgaaaatatatcttgttcactgagaaaaaaaaaa

SEQ ID NO: 1002 - DNA, 112 bp, Homo sapiens
gtgggccccatgttctgcagatggaaatcaacctcacctcctgggggacaggctgcccatcccgttgataaattgactatgccaataaatcaacatggttcaaaaaaaaaaa

SEQ ID NO: 1003 - DNA, 153 bp, Homo sapiens
ataccctctccacgtgaggcccagtgaagccagccttcctacgcccagtgagatgaccctggaaacagactgatgccaacctgaatatatgaacttctggtgtgatgtggatgaaaatatatcttgttcactgagtttgctataaaaaaaaaa

SEQ ID NO: 1004 - DNA, 159 bp, Homo sapiens
  misc_feature (1)...(159): n = A,T,C or G
taccactctaccacctgaggcccagtgaagccagccttcctacgcccagtgagatgaccctggaaacagactgatgccaacctgaatatatgaacttctggtgtgatgtgaatgaaaatatatcttgttcactgantttgctatagggaaaaaaaaaaa

SEQ ID NO: 1005 - DNA, 140 bp, Homo sapiens
ccctctccactgaggcccagtgaagccagccttcctacgcccagtgagatgaccctggaaacagactgatgccaacctgaatatatgaacttctggtgtgatgtgaatgaaaatacatcttgttcactgaaaaaaaaaaa

SEQ ID NO: 1006 - DNA, 128 bp, Homo sapiens
gtgtgaacaatgaagcaaagatcgggttggaagagggcaagaggaaagggggggatggaaggaaaccctgcagccaccaacacaataaacacaataaacctgtatcctgaccacctcaaaaaaaaaaa

SEQ ID NO: 1007 - DNA, 137 bp, Homo sapiens
tctccactgaggcccagtgaagccagccttcctacgcccagtgagatgaccctggaaacagactgatgccaacctgaatatatgaacttctggtgtgatgtgaatgaaaatatatcttgttcactgaaaaaaaaaaa

SEQ ID NO: 1008 - DNA, 188 bp, Homo sapiens; identical to SEQ ID NO: 884

SEQ ID NO: 1009 - DNA, 105 bp, Homo sapiens
  misc_feature (1)...(105): n = A,T,C or G
cagaggcccagtgaagccagccttcctcagcccagtgagatgaccctgganacagactgatgccaacctgaatatatgaacttctggtgagatgcgaatgaaaat

SEQ ID NO: 1010 - DNA, 160 bp, Homo sapiens
tctatcagcctcagatcaccatctaccactgaggcccagtgaagccagccttcctacgcccagtgagatgaccctggaaacagactgatgccaacctgaatatatgaacttctggtgtgatgtgaatgaaaatatatcttgttcactgagaaaaaaaaaa

SEQ ID NO: 1011 - DNA, 145 bp, Homo sapiens
  misc_feature (1)...(145): n = A,T,C or G
cctcaggatcccatctaccactgangcccagtgaagccagccttcctacgcncanngagannaccctggnaacagactgatgccaacctgantatatgaacttctggtgtgatgtgaangaaaatatatattgttcactgagaaa

SEQ ID NO: 1012 - DNA, 127 bp, Homo sapiens
  misc_feature (1)...(127): n = A,T,C or G
atactttctaccactgaggcccagtgaagccagcctttctacgcncantgngannaccctggaaacagactgatgccaacctgaatatatgaacttctggtgtgatgtgaatgaaaatatatcattg

SEQ ID NO: 1013 - DNA, 135 bp, Homo sapiens
  misc_feature (1)...(135): n = A,T,C or G
cctcttgaggcccagtgaagccagccttcctacgcccagtgagatgaccctggaaacagactgatgccaacctgaatatatgaacttctggtgngatgtgaatgaaantatatcttgttcactgaaaaaaaaaaa

SEQ ID NO: 1014 - DNA, 140 bp, Homo sapiens
ccgtctcccatgaggcccagtgaagccagccttcctacgcccagtgagatgaccctggaaacagactgatgccaacctgaatatatgaacttctggtgtgatgtgaatgaaaatatatcttgttcactgaaaaaaaaaaa

SEQ ID NO: 1015 - DNA, 150 bp, Homo sapiens
gcctagataccatctaccctgaggcccagtgaagccagccttcctacgcccagtgagatgaccctggaaacagactgatgccaacctgaatatatgaacttctggtgtgatgtgaatgaaaatatatcttgttcactgagaaaaaaaaaa

SEQ ID NO: 1016 - DNA, 135 bp, Homo sapiens
ccacatgaggcccagtgaagccagccttcctacgcccagtgagatgaccctggaaacagactgatgccaacctgaatatatgaacttctggtgtgatgtgaatgaaaatatatcttgttcactgaaaaaaaaaaa

SEQ ID NO: 1017 - DNA, 162 bp, Homo sapiens
ctctcatcagcctcagttcaccatctaccactgaggcccagtgaagccagccttcctacgcccagtgagatgaccctggaaacagactgatgccaacctgaatatatgaacttctggtgtgatgtgaatgaaaatatatcttgttcactgagaaaaaaaaaa

SEQ ID NO: 1018 - DNA, 134 bp, Homo sapiens
  misc_feature (1)...(134): n = A,T,C or G
cccatgaggcccagtgaagccagccttcctacgcccagtgagatgaccctggaaacagactgatgccaacctgaatatatgaacttctggtgtgatgtgaatgaaaatatatcttgntcactgaaaaaaaaaaa

SEQ ID NO: 1019 - DNA, 188 bp, Homo sapiens; identical to SEQ ID NO: 884

SEQ ID NO: 1020 - DNA, 140 bp, Homo sapiens
  misc_feature (1)...(140): n = A,T,C or G
atcaaccacatgaggccccagtgaagccagccttcctacgcccagtgagangaccctggaaacagactgatgccaacctgaatatatgaacttctggtgtgatgngaatgaaaatatatcttgttcactgaaaaaaaaaa

SEQ ID NO: 1021 - DNA, 119 bp, Homo sapiens
tgaagccagccttcctcgcccagtgagatgaccctggaaacagactgatgccaacctgaatatatgaacttctggtgtgatgtgaatgaaaatatatcttgttcactgaaaaaaaaaaa

SEQ ID NO: 1022 - DNA, 133 bp, Homo sapiens
  misc_feature (1)...(133): n = A,T,C or G
catgaggcccagtgaagccagccttcctacgcncagntgagatgaccctggatacagactgatgccaacctgaatatatgaacttctggtgtgatgtgaatgaaaatatatcttgttcactgaaaaaaaaaaa

SEQ ID NO: 1023 - DNA, 139 bp, Homo sapiens
  misc_feature (1)...(139): n = A,T,C or G
ccgtctccctgaggcccagtgaagccagccttcntacgcccagtgagatgaccctggaaacagactgatgccaacctgaatatatgaacttctggtgtgatgtgaatgaaaatatatcttgttcactgaaaaaaaaaaa

SEQ ID NO: 1024 - DNA, 152 bp, Homo sapiens
gcctcagatcaccatctaccactgaggcccagtgaagccagccttcctacgcccagtgagatgaccctggaaacagactgatgccaacctgaatatatgaacttctggtgtgatgtgaatgaaaatatatcttgttcactgaaaaaaaaaaa

SEQ ID NO: 1025 - DNA, 145 bp, Homo sapiens
cccgtcgtcacacatgaggcccagctgaagccagccttcctacgcccagtgagatgaccctggaaacagactgatgccaacctgaatatatgaacttctggtgtgatgtgaatgaaaatatatcttgttcactgaaaaaaaaaaa

SEQ ID NO: 1026 - DNA, 158 bp, Homo sapiens
ctctatcagcctcagataccatctccactgaggcccagtgaagccagccttcctacgcccagtgagatgaccctggaaacagactgatgccaacctgaatatatgaacttctggtgtgatgtgaatgaaaatatatcttgttcactgaaaaaaaaaaa

SEQ ID NO: 1027 - DNA, 144 bp, Homo sapiens
  misc_feature (1)...(144): n = A,T,C or G
cccgtcgtaccacatgaggcccagngaagccagccttcctacgcccagtgagatgaccctggaaacagactgatgccaacctgaatatatgaacttcnggtgtgatgtgaatgaaaatatatcttgttcactgaaaaaaaaaaa

SEQ ID NO: 1028 - DNA, 142 bp, Homo sapiens
ccgtctaccacatgaggcccagtgaagccagccttcctacgcccagtgagatgaccctggaaacagactgatgccaacctgaatatatgaacttctggtgtgatgtgaatgaaaatatatcttgttcactgaaaaaaaaaaa

SEQ ID NO: 1029 - DNA, 127 bp, Homo sapiens
  misc_feature (1)...(127): n = A,T,C or G
tctcacgtgaggcccagngaagccagccttcctacgcccagtngagatgaccctggaaacagactgatgccaacctgaatatatgaacttctggtgtgatgtgaatgaaantatatcttgctcactg

SEQ ID NO: 1030 - DNA, 158 bp, Homo sapiens
tctatcagcctcagataccatctaccactgaggcccagtgaagccagccttcctacgcccagtgagatgaccctggaaacagactgatgccaacctgaatatatgaacttctggtgtgatgtgaatgaaaatatatcttgttcactgaaaaaaaaaaa

SEQ ID NO: 1031 - DNA, 159 bp, Homo sapiens
tctatatgcctcagatcaccatctaccactgaggcccagtgaagccagccttcctacgcccagtgagatgaccctggaaacagactgatgccaacctgaatatatgaacttctggtgtgatgtgaatgaaaatatatcttgttcactgaaaaaaaaaaa

SEQ ID NO: 1032 - DNA, 118 bp, Homo sapiens
  misc_feature (1)...(118): n = A,T,C or G
ccacatgaggcccagngaanccagccttcctacgcccagtgagatgaccctggaaacagactgatgccaacctgaatatatgaactngctggtgngatgtgaatgaaaatatatcttg

SEQ ID NO: 1033 - DNA, 162 bp, Homo sapiens
actcactagggaagctatgcgaaattatttaaaagaacgaggggatcaaacagtgctcattcttcatgcaaaagttgcacagaagtcttacggaaatgaaaaacgatttttttgccctcctccttgtgtgtatcttatgggcagtggttggaaaaaaaaaaa

SEQ ID NO: 1034 - DNA, 135 bp, Homo sapiens
  misc_feature (1)...(135): n = A,T,C or G
ccattctaccacctgaggcccagtgaagccagccttcctacgcccagngagatgaccctggaaacagactgatgccancctgaatatatgaacttctggtgtgatgtgaatgaaaatacatcttgttcactgaaa

SEQ ID NO: 1035 - DNA, 127 bp, Homo sapiens
  misc_feature (1)...(127): n = A,T,C or G
ggcccagtgaagccagccttcctacgcccagngagatgaccctggaaacagactgatgccaacctgaatatatgaacttctggtgtgatgtgantgaaaatatatcttgctcactgaaaaaaaaaaa

SEQ ID NO: 1036 - DNA, 134 bp, Homo sapiens
  misc_feature (1)...(134): n = A,T,C or G
tgttggatgcaggcacntctggctccaaactgtgttcttccaagtgccctgtctccttccagcataccactgagatgtcaaagtccaccatggttaaacatttcttgtagtcccttttgcctcaaaaaaaaaaa

SEQ ID NO: 1037 - DNA, 118 bp, Homo sapiens
tatggcatccaaactgtgttcttccaagtgccctgtctccttccagcataccactgagatgtcaaagtccaccatggttaaacatttcttgtagtcccttttgcctcaaaaaaaaaaa

SEQ ID NO: 1038 - DNA, 111 bp, Homo sapiens
gatgacggacgtctggcgtccaaacctgtgttcttccaagtgccctgtctccttccagcataccacctgagatgtcaaagtccaccatggttaaacatttcttgtagtcca

SEQ ID NO: 1039 - DNA, 113 bp, Homo sapiens
acggacatctggctccaaactgtgttcttccaagtgccctgtctccttccagcataccactgagatgtcaaagtccaccatggttaaacatttcttgtagtcaaaaaaaaaaa

SEQ ID NO: 1040 - DNA, 114 bp, Homo sapiens
tgagggacatctggctcaaactgtgttcttccaagtgccctgtctccttccagcataccactgagatgtcaaagtccaccatggttaaacatttcttgtagtcaaaaaaaaaaa

SEQ ID NO: 1041 - DNA, 248 bp, Homo sapiens
  misc_feature (1)...(248): n = A,T,C or G
atgctacagtacctgcactttaccccagtagccctgaagtgtgggccccgtaccctctgtacccagcggagttagcgcctgctcttcctnctcctgccgctttcacctaccccgcttcactgcatgcccagagncnctgtatagangcntaggangacacanctcgagggctggacagtgactggcagnttgatnatganngngtgtgtgngaaagagcntgacacatatnaaagctactgaagacca

SEQ ID NO: 1042 - DNA, 128 bp, Homo sapiens
tttgatgaggagagaatgaagctgtggatggagtttcagcaaagcctgttcattcagaagataaagactgaacaaatgggaaaataatgtagaaataaaagggaaagtgacagaaatggaaaaaggga

SEQ ID NO: 1043 - DNA, 142 bp, Homo sapiens
ccctctccacctgaggcccagtgaagccagccttcctacgcccagtgagatgaccctggaaacagactgatgccaacctgaatatatgaacttctggtgtgatgtggatgaaaatatatcttgttcactgagaaaaaaaaaa

SEQ ID NO: 1044 - DNA, 150 bp, Homo sapiens
gcctagataccatctaccctgaggcccagtgaagccagccttcctacgcccagtgagatgaccctggaaacagactgatgccaacctggatatatgaacttctggtgtgatgtggatgaaaatatatcttgttcactgagaaaaaaaaaa

SEQ ID NO: 1045 - DNA, 139 bp, Homo sapiens
tctaccactgaggcccagagaagccagccttcctacgcccagtgagatgaccctggaaacagactgatgccaacctgaatatatgaacttctggtgtgatgtggatgaaaatatatcttgttcactgagaaaaaaaaaa

SEQ ID NO: 1046 - DNA, 168 bp, Homo sapiens
tctcatcagcctcagatcaccatctaccactgaggcccagtgaagccagccttccgacgcccagtgagatgaccctggaaacaaactgatgccaacctggatatatgaacttctggtgtgatgtgaatgaaaatatatcttgtttactgagtttgctaaaaaaaaaaa

SEQ ID NO: 1047 - DNA, 143 bp, Homo sapiens
ccactgaggcccagtgaagccagccttcctacgcccagtgagatgaccctggaaacagactgatgccaacctgaatatatgaacttctggtgtgatgtgaatgaaaatatatcttgttcactgagtttgctataaaaaaaaaa

SEQ ID NO: 1048 - DNA, 129 bp, Homo sapiens
  misc_feature (1)...(129): n = A,T,C or G
gactgaggtgcgcgtgtcgncgangccgncggtcggagcgattctcacggnggaaggagcacgccaacagggcctgactgcgtacagacatgtgcccctcaataaaattgcagttgaaatggaaaaaaa

SEQ ID NO: 1049 - DNA, 213 bp, Homo sapiens
  misc_feature (1)...(213): n = A,T,C or G
aataaatataaggccagagctttggncattntttnccattnagncntatacntgacgtantcgttcctcgnngagnntctcctngaagctagtatangggacngncttgtacantgccangcagacattgtaatccgagctccagtcagattaaggccagnctggcctacattgaaaaacctcattttanggaaagtgaaatactttgtcaat

SEQ ID NO: 1050 - DNA, 135 bp, Homo sapiens
ccactgaggcccagtgaagccagccttcctacgcccagtgagatgaccctggaaacagactgatgccaacctgaatatatgaacttctggtgtgatgtgaatgaaaatatatcttgttcactgagaaaaaaaaaa

SEQ ID NO: 1051 - DNA, 132 bp, Homo sapiens
  misc_feature (1)...(132): n = A,T,C or G
actgggggcaggagtgctttgcaaacagaagacctgcaggaaatgccgagtaatgacttgtgttgggtcaccctccctgctcccgtnttcttttaaaacaaataaacagaatggaaacgcccacaaaaaaaa

SEQ ID NO: 1052 - DNA, 141 bp, Homo sapiens
ccatctaccactgaggcccagtgaagccagccttcctacgcccagtgagatgaccctggaaacagactgatgccaacctgaatatatgaacttctggtgtgatgtgaatgaaaatatatcttgttcactgaaaaaaaaaaa

SEQ ID NO: 1053 - DNA, 336 bp, Homo sapiens
  misc_feature (1)...(336): n = A,T,C or G
gctcagctgaggggcgtttntagatcagaatttcagtccaacgaanggtaacattgnncttgngngnctttccagacttcaagcnccaactcaccaccnaagattttaccgaaaaccttagggccaataaatgtgaatgttggnccccaaatgattataagcacaccgcanagaattgccnattcaggaanngttctgattgggaatccatatacccctgcacccgcaatggtcactcagactcacatagctgaggctgctggctgggttcccagtgatngaanccgagctagagaatttatagactctgntttttcagaaagtaaacgaagcaaa

SEQ ID NO: 1054 - DNA, 106 bp, Homo sapiens
  misc_feature (1)...(106): n = A,T,C or G
ggatggagtttcagcaaagcctgttcnttcagaagataaagactgaacaaatgggaaaataatgtagaaataanaagggaaagtgacagaaatggaaaaaaaaaaa

SEQ ID NO: 1055 - DNA, 106 bp, Homo sapiens
gcatgtggatggagtttcagcaaagcctgttcattcagaagataaagactgaacaaatgggaaaataatgtagaaataaaagggaaagtgacagaaatggaaaaaa

SEQ ID NO: 1056 - DNA, 128 bp, Homo sapiens
  misc_feature (1)...(128): n = A,T,C or G
tttgctgcccaaagaaacacaagccttcctacgcccagngtgatgnccctggnnacagactgatgccttcctgaatgtatgganctnccggtgtgatgtgaatgaaaatatntcttgtttactgaaaa

SEQ ID NO: 1057 - DNA, 110 bp, Homo sapiens
  misc_feature (1)...(110): n = A,T,C or G
catgtggatggagtttcagcaaagcctnttcattcagaagataaagactgaacaaatgggaaaataatgtagaaataaaagggaaagtgacagaaatggaaaaaaaaaaa

SEQ ID NO: 1058 - DNA, 113 bp, Homo sapiens
gaggctgtggatggagtttcagcaaagcctgttcattcagaagataaagactgaacaaatgggaaaataatgtagaaataaaagggaaagtgacagaaatggaaaaaaaaaaa

SEQ ID NO: 1059 - DNA, 102 bp, Homo sapiens
ctggagtttcagcaaagcctgttcattcagaagataaagactgaacaaatgggaaaataatgtagaaataaaagggaaagtgacagaaatgaaaaaataaaa

SEQ ID NO: 1060 - DNA, 123 bp, Homo sapiens
  misc_feature (1)...(123): n = A,T,C or G
tgttggatgcaggcacctctggctccaaactgtgttcttccaagtgccctgtctccttccagcataccacctgagatgtcaaagnccaccatggttaaacatttcttgtagtcccttttgcct

SEQ ID NO: 1061 - DNA, 123 bp, Homo sapiens
tagttggatgaggcactctggctccaaactgtgttcttccaagtgccctgtctccttccagcataccacctgagatgtcaaagtccaccatggttaaacatttcttgtagtcaaaaaaaaaaa

SEQ ID NO: 1062 - DNA, 165 bp, Homo sapiens
  misc_feature (1)...(165): n = A,T,C or G
acgtcacgtagtggaagctatgcgaanttatttaaaagaacgangggatcaaacagngctcattcttcatgcanaagttgcacagaagtcttacggaaatganaaacgatttttntgccctcctccttgtgtgtatcttatgggcagtggttggaaaaaaaaaaa

SEQ ID NO: 1063 - DNA, 179 bp, Homo sapiens
  misc_feature (1)...(179): n = A,T,C or G
tgaaaaagatgcccagactngcaccaggncacacagcagacgcactaantggatgcnngnactcnggntcnaaacngtgntcttncaagtgccctgtctccttccagcataccactgagatgtcaaagtccaccatggttaaacatttcttgtagtcccttttgccttaaaaaaaaaaa

SEQ ID NO: 1064 - DNA, 103 bp, Homo sapiens
  misc_feature (1)...(103): n = A,T,C or G
gcacatctggctccaaactgtgtctcttncaagtgccctgtctccttccagcataccactgagatgtcaaagtccaccatggttaaacatttcttgtagtcca

SEQ ID NO: 1065 - DNA, 164 bp, Homo sapiens
  misc_feature (1)...(164): n = A,T,C or G
tacaggcggctgttccctgcctgggatggctactggganctgantgaagcactnanaccantgagccgccctccagcnncagtgattaacactagctgctcttccggaggaccaagatnatgnttccnagcacacacatgatggcctacaaccttccatcaact

SEQ ID NO: 1066 - DNA, 124 bp, Homo sapiens
  misc_feature (1)...(124): n = A,T,C or G
gacgttgcccaggccacacagtggaggcactagttggatgcaggcncntctggctccaaanngngatcttccaagngcccngtgtccttccagcataccactgagangtcaaagtccaccatgg

SEQ ID NO: 1067 - DNA, 163 bp, Homo sapiens
aaaactgagcaggaggtggtggagggaatggatatctctactcgctccaaagatcctgtctctacagagaaaacggccccgaaacggaagttccccagccctccacattcctccaatggccattcgccccaagactcatccacgagccccattaaaaaaaaaa

SEQ ID NO: 1068 - DNA, 164 bp, Homo sapiens
  misc_feature (1)...(164): n = A,T,C or G
ccgtggggggccggggagacagggagccgacacaggccactgtctgcagaatggcagattatntggacattgaacattgcaaaaccggatnagcgtntctggctttttatgccggcnncatcaataaaatactgctcatgcagtgctacctctaaaaaaaaaaa

SEQ ID NO: 1069 - DNA, 111 bp, Homo sapiens
  misc_feature (1)...(111): n = A,T,C or G
gtggcgtgcaaactgtgttcttccaagtgccctgtctccttccagcataccactgagatgtcaaagtccaccatgagttaaacatttcttgnngtcccttttgcctcaaaa

SEQ ID NO: 1070 - DNA, 164 bp, Homo sapiens
actcacctagggaagctatgccgaaattatttaaaagaacgaggggatcaaacagtgctcattcttcatgcaaaagttgcacagaagtcttacggaaatgaaaaacgatttttttgccctcctccttgtgtgtatcttatgggcagtggttggaaaaaaaaaaa

SEQ ID NO: 1071 - DNA, 115 bp, Homo sapiens
aaggcacgtgtgggtccaaacgtgtgttcttccaagtgccctgtctccttccagcataccactgagatgtcaaagtcaaccatggttaaacatttcttgtagtcaaaaaaaaaaa

SEQ ID NO: 1072 - DNA, 117 bp, Homo sapiens
tgaaggacgtgtggcgtccaaacctgtgttcttccaagtgccctgtctccttccagcataccactgagatgtcaaagtccaccatggttaaacatttcttgtagtcaaaaaaaaaaa

SEQ ID NO: 1073 - DNA, 113 bp, Homo sapiens
  misc_feature (1)...(113): n = A,T,C or G
tggcgtccaaacgtgngttcttccaagtgccctgnctccttccagcataccactgagatgtcaaagtccaccatggttaaacatttcttttagtcccttttgcctcaaaaaaa

SEQ ID NO: 1074 - DNA, 105 bp, Homo sapiens
  misc_feature (1)...(105): n = A,T,C or G
ttgctgctccagttgatgtgcttgcctgctgtggtgcctccctaccaggacagactcttgtgctttngggaccataagccaaataaacccttccttccataaaaa

SEQ ID NO: 1075 - DNA, 117 bp, Homo sapiens
  misc_feature (1)...(117): n = A,T,C or G
ggtcagacagtgaagctgnggatggagtttcagctcccgcctgttcattcagaagataaagactgaacaaatgggaaaataatgtagaaataaaagggaaagtgacagaaaaaaaaa

SEQ ID NO: 1076 - DNA, 108 bp, Homo sapiens
  misc_feature (1)...(108): n = A,T,C or G
tgtggatggagtttcagcaaagcctgttcattcagaagataaagactgaacaaatggganaataatgtagaaataaaagggaangtgacagaaatggaaaaaaaaaaa

SEQ ID NO: 1077 - DNA, 136 bp, Homo sapiens
  misc_feature (1)...(136): n = A,T,C or G
gtggagaggctctgaagagnagacantgaagctgtggatggagtttcagcaaagcctgttcattcagaagataaagactgaacaaatgggaaaataatgtagaaataaaagggaaagtgacagaaatgaaaaaaaa

SEQ ID NO: 1078 - DNA, 111 bp, Homo sapiens
  misc_feature (1)...(111): n = A,T,C or G
tgcctgtggatggagtttcagcacancctgttcattcagaagataaagactgaacanntgggaaaataatgtanaaataaaagggaaagtgacagaaatggaaaaaaaaac

SEQ ID NO: 1079 - DNA, 111 bp, Homo sapiens
tgaggcgtgtggttggagtttctgcaaagcctgttcattcagaagataaagactgaacaaatgggaaaataatgtagaaataaaagggaaagtgacagaaatggaaaaaaa

SEQ ID NO: 1080 - DNA, 120 bp, Homo sapiens
  misc_feature (1)...(120): n = A,T,C or G
aagatgagacaatgaagcntgtggatggagtttcagcanagcctgttcattcagaagataaagactgancaaatgggaaaataatgtataantaaaagggaaagtgacagaaatggagaa

SEQ ID NO: 1081 - DNA, 102 bp, Homo sapiens
  misc_feature (1)...(102): n = A,T,C or G
aactggggcctgtggntggagtttcagcaaagcctgttcattcagaagataaagactgancaaatgggaaaataatgtagaaataaaagggaaagtgacaga

SEQ ID NO: 1082 - DNA, 155 bp, Homo sapiens
ttgctgagtggagaggttttgaagaggagagaatgaagctgtggatggagtttcagcaaagcctgttcattcagaagataaagactgaacaaatgggaaaataatgtagaaataaaagggaaagtgacagaaatggagaaagggaaaaaaaaaaa

SEQ ID NO: 1083 - DNA, 256 bp, Homo sapiens
  misc_feature (1)...(256): n = A,T,C or G
attagaagtttaggtcaacaaaaggtaacatttcaccttgttgcctttccagtttcaagcaccaactcaccaacaaagattttaccgaaaaccttagggccaataaatgtgaatgttggaccccaaatgattataagcacacccgcagagaattgccaattcaggangggttctgattgggaatccatatacccctgcacnngcaanggtcactcanactcacatagctgaggctnggtggctgggttcccagtag

SEQ ID NO: 1084 - DNA, 107 bp, Homo sapiens
ctgctccagtcgctgtgcttgcctgctgtggtgcctccctaccaggacagactcttgtgcttttggaaccataagccaaataaacccttccttccataaaaaaaaaa

SEQ ID NO: 1085 - DNA, 101 bp, Homo sapiens
  misc_feature (1)...(101): n = A,T,C or G
ttgctgctccagtccatgtgcttgcctgctgtggtgcctccctaccaggacagactcttgtgctttnggaaccataagccaaataaacccttccttccata

SEQ ID NO: 1086 - DNA, 109 bp, Homo sapiens
ctgctccagtcgcatgtgccttgcctgctgtggtgcctccctaccagaacagactcttgtgctttgggaaccataagccaaataaacccttccttccataaaaaaaaaa

SEQ ID NO: 1087 - DNA, 156 bp, Homo sapiens
  misc_feature (1)...(156): n = A,T,C or G
ctcaatgagagatggctaagcagttaagtgtgcataccaataccngnggaagaacccatatcggacagcttcacaattgcctgtaatctgagntccagngggctctgacacctnnttttntctganngacaatggtactcacataatacctacatt

SEQ ID NO: 1088 - DNA, 110 bp, Homo sapiens
ttgctgctccagtcgctgtgcttgcctgctgtggtgcctccctaccaggacagactcttgtgcttttggaaccataagccaaataaacccttccttccataaaaaaaaaa

SEQ ID NO: 1089 - DNA, 111 bp, Homo sapiens
  misc_feature (1)...(111): n = A,T,C or G
ttgctgctccagtcagctgtgcttgcctgctgtggtgcctccctaccaggacagactcntgtgcttttggaaccataagccaaataaacccttccttccataaaaaaaaaa

SEQ ID NO: 1090 - DNA, 109 bp, Homo sapiens
  misc_feature (1)...(109): n = A,T,C or G
tgctgctccagtcgctgtgcttgcctgctgtggtgcctccctaccaggacagactcttgggcntttggaaccataagccaaataaacccttccttccataaaaaaaaaa

SEQ ID NO: 1091 - DNA, 112 bp, Homo sapiens
  misc_feature (1)...(112): n = A,T,C or G
ttgctgctccagtccnttgtgcttgcctgctgtggtgcctccctaccaggacagactcttgggcttttggaaccataagccaaataaacccttccttccataagaaaaaaaa

SEQ ID NO: 1092 - DNA, 103 bp, Homo sapiens
  misc_feature (1)...(103): n = A,T,C or G
gcttgctgctccagtcggtgngctngcctgctgtggtgcctccctaccaggacagactcttgggcttttggaaccataagccaaatnaacccttccttccata

SEQ ID NO: 1093 - DNA, 112 bp, Homo sapiens
  misc_feature (1)...(112): n = A,T,C or G
gcttgctgctccagtcnctgtgcttgcctgctgtggtgcctccctaccaggacagactcttgngcttttggaaccataagccaaataaacccttccttccataaaaaaaaaa

SEQ ID NO: 1094 - DNA, 103 bp, Homo sapiens
  misc_feature (1)...(103): n = A,T,C or G
tgctgctccagtcgctgtgcttgcctgctgtgntgcctccctaccaggacagactcttgtgcttttggaaccataagccaaataaacccttccttccataaaa

SEQ ID NO: 1095 - DNA, 109 bp, Homo sapiens
tgctgctccagtcgctgtgcttgcctgctgtggtgcctccctaccaggacagactcttgtgcttttggaaccataagccaaataaacccttccttccataaaaaaaaaa

SEQ ID NO: 1096 - DNA, 101 bp, Homo sapiens
  misc_feature (1)...(101): n = A,T,C or G
catgtgggcccctgttctggcagatggaaatcancctcacctnctgggggacaggctgcccatctcgttgataaattgactatgccaataaattaacatgg

SEQ ID NO: 1097 - DNA, 189 bp, Homo sapiens; identical to SEQ ID NO: 353

SEQ ID NO: 1098 - DNA, 146 bp, Homo sapiens
  misc_feature (1)...(146): n = A,T,C or G
tgtcctcaacttgctgagtggagaggttttgaagangagagaatgaggctgtggatggagtttcancaaancctgttcattcagaagataaagactgaacaaatgggaaaataatgtagaaataaaagggaaagtgacatgaaatg

SEQ ID NO: 1099 - DNA, 143 bp, Homo sapiens
  misc_feature (1)...(143): n = A,T,C or G
cggcttgaccaggccaccctnnccgnaggccctactgggatgcnggcantctggctccgaactgtgtgtcttccaagtgccctgtctccttccagcataccactganatgtcaaagnccaccatggtctaaacatttcttgta

SEQ ID NO: 1100 - DNA, 111 bp, Homo sapiens
agaatggcagattatttggacattgaacattggaaaacggagagctttctggctttttatgcggcttcatcaataaaatactgctcagcgtgctacctctaaaaaaaaaaa

SEQ ID NO: 1101 - DNA, 272 bp, Homo sapiens
  misc_feature (1)...(272): n = A,T,C or G
atgatgacactgccctgcantctgcccctgccgagagtctgacctgtcttcctgagagattcctgataaactgccagcctggcagcctggaatgactccaggcaccaagagtggaactggcgacttactgctaacggctctggcggactagtgctaacantgtggcaacaaaacatcaagaagcctggnnatggcaaggggatggggcttcccccccttttataangcacagactggctagtaaacatttgagccctttgaaaaaaaaagaa

SEQ ID NO: 1102 - DNA, 128 bp, Homo sapiens
  misc_feature (1)...(128): n = A,T,C or G
gactgagggatttatcaaagatgtcccggagnntccctcacagttgtttttgaaaataattggcaaccagaacgccaggttccgtttaatgaagtgcgattaccaccaccacctgatataaaaaaaaa

SEQ ID NO: 1103 - DNA, 132 bp, Homo sapiens; identical to SEQ ID NO: 843

SEQ ID NO: 1104 - DNA, 110 bp, Homo sapiens
aggccagcctggcctcattgagaaacctcattttgggaaagtgaaatactttgtcaattaacatgcagttggttcaataaagacttttggaaagtgtcgaaaaaaaaaaa

SEQ ID NO: 1105 - DNA, 110 bp, Homo sapiens
  misc_feature (1)...(110): n = A,T,C or G
actccagcgcttcctacgcccantgagatgaccctggaaacagactgntgccaacctgaatatatgaacttctggtgtgatgtgaatgaaaatatatcttgttcactgaa

SEQ ID NO: 1106 - DNA, 172 bp, Homo sapiens
  misc_feature (1)...(172): n = A,T,C or G
tgagataaatcaaagncaaattaaaggagaaagncaaagagagagagaaaaagangcatancggtaatgagtgagatcaagaaagaaaatggagatgtaaagattttactgaaaagtgggaaggagaaaccaaaancaaatatagaagacttacaaattaaaaaagtaaaaa

SEQ ID NO: 1107 - DNA, 132 bp, Homo sapiens
  misc_feature (1)...(132): n = A,T,C or G
actgaaggtgtgagctctctgcttgctgctccagtcgctgtgcttgcctgctgtggtgcctccctaccaggacagactcttgngcttttggaaccataagccaaataaacccttccttccataaaaaaaaaa

SEQ ID NO: 1108 - DNA, 170 bp, Homo sapiens
  misc_feature (1)...(170): n = A,T,C or G
aggaataaaaactgagcaggaggtggtggagggaatggatatctctactcgctccaaagatcctgnctctacagagaaaacggccccgaaacggaagttccccagccctccacattcctccaatggncattcgccccaagactcatccacgagccccattaaaaaaaaaa

SEQ ID NO: 1109 - DNA, 308 bp, Homo sapiens
  misc_feature (1)...(308): n = A,T,C or G
ggcgtgcatcaccaacaaacantggaannattttggancagctgacccactcaggacctaaacatggccttaggngggtgcncgtgccacccacgtccgnatacccccacagccctgnagcaaaggtggaggacatcagccgcacagactgnctatatccacgtgggtctcaggcttaattgcagcccagggcagcagcatggaccacagataccaacgtggcatcacagaccaccatggaggagggcctcctctctggcctctgtcgttgactagagccaggggaagcctgtgtaaactccaggctg

SEQ ID NO: 1110 - DNA, 135 bp, Homo sapiens
gagtactgaggtgtgagctctctgcttgctgctccagtcgctgtgcttgcctgctgtggtgcctccctaccaggacagactcttgtgcttttggaaccataagccaaataaacccttccttccataaaaaaaaaa

SEQ ID NO: 1111 - DNA, 190 bp, Homo sapiens
tggagcttggcttgaagaaggaaataaaacctggagcaggaggtggtggagggaatggatatctctactcgctccaaagatcctgtctctacagagaaaacggccccgaaacggaagttccccagccctccacattcctccaatggccattcgccccaagactcatccacgagccccattaaaaaaaaaa

SEQ ID NO: 1112 - DNA, 209 bp, Homo sapiens
  misc_feature (1)...(209): n = A,T,C or G
aactgagtgtcaggattgaatctggactctgctggtgtggagcagttctgtcatgtctccagcagagggcgcattctgcattcttcagaacctcaagangctcaagtgtagcagaccntgagaaactgggctaccctttgaagaggagagatgcagtcttttcagttcaattaatttaaagggtctatttaaaaagccaaaaaaaaaaa

SEQ ID NO: 1113 - DNA, 187 bp, Homo sapiens
  misc_feature (1)...(187): n = A,T,C or G
actgagcttggctgaagaggaaataaaactgagcaggaggtggnggagggaatggatatctctactcgctccaaagatcctgtctctacagagaaaacggccccgaaacggaagttccccagccctccacattcctccaatggccattcgccccaggactcatccacgagccccattaaaaaaaaaa

SEQ ID NO: 1114 - DNA, 117 bp, Homo sapiens
  misc_feature (1)...(117): n = A,T,C or G
gactgagatcctgtctctacagagtaaacggccccgaacggaagttccccagccctncacattcctccaatggccattcgccccaagactcatccacgagccccattaaaaaaaaaa

SEQ ID NO: 1115 - DNA, 120 bp, Homo sapiens
  misc_feature (1)...(120): n = A,T,C or G
gacaactgccctgagcntctgcccctgccgagagtctgancctgtcttcctgagagatnnctgaatanactgccancctggcagcctggaatgactccangcnccaagagtggaaaaaaa

SEQ ID NO: 1116 - DNA, 121 bp, Homo sapiens
  misc_feature (1)...(121): n = A,T,C or G
actgccctgagtttctgccacctgccgagagtctgaacctgtcttcctgagagattcctgaataaactgccagcctggcagcctggantgactccaggcaccaagagtggaaaaataaaaa

SEQ ID NO: 1117 - DNA, 150 bp, Homo sapiens
  misc_feature (1)...(150): n = A,T,C or G
gactggactggcagcctgnctgcctgatatgacnncaggcaccaagagtggaactgacanacntactgctaacggctctggcggactantgctaacanngtggcancaaaacatcaagaagcctggnatggcaggggatgggcttccccc

SEQ ID NO: 1118 - DNA, 111 bp, Homo sapiens
  misc_feature (1)...(111): n = A,T,C or G
ctggagtgactccaggcaccaagagtggaactggcnacntactgctaacggntctggcgnactattgctaacaatgnggcaacanaccatcangaagcctggcatggcagg

SEQ ID NO: 1119 - DNA, 220 bp, Homo sapiens
  misc_feature (1)...(220): n = A,T,C or G
actgagagacaactgccctgagattntncccctgccgagagtctgaacctgtcttnctganagattcctgaataaactgccagcctggcagcctggaatgactccaggcaccaagagtggaactggcgacttactgctaaccggctctggcggactagtgctaacantgnggcnacaaaacatcaagaagcctggcatggcaggggatgggccttccccc

SEQ ID NO: 1120 - DNA, 104 bp, Homo sapiens
  misc_feature (1)...(104): n = A,T,C or G
ggatctgccctctgccgaggagtctgaacctgtcttgctgagcagatncctgantaaactgccagcctggctgnctggaatgactccaggcaccaagagtggaa

SEQ ID NO: 1121 - DNA, 157 bp, Homo sapiens
  misc_feature (1)...(157): n = A,T,C or G
tctgccacctgccgagtagtctgaacctgncttcntgagagattcctgaatnaactgccancctgncagcctgnaatgactccaggcaccaanagtggaactggctgacttactgntaacngctctggcggactantgctaacaatgtggcaacaaa

SEQ ID NO: 1122 - DNA, 226 bp, Homo sapiens
  misc_feature (1)...(226): n = A,T,C or G
gactgagtgacaactgccctgagcattctgcccctgccgagtagcctgaacctgtcttcctgagagattcctgaataaacngccagcctggcagcctggaatgactccaggcaccaagagtggaactggcgacttactgctaacggctctggcggactagtgctaacaatgtggcaacaaaacatnaagaagcctggcatggcaggggatgggcttccccctttat

SEQ ID NO: 1123 - DNA, 123 bp, Homo sapiens
gactgagtgacaactgccctgagatctgccacctgccgagagcctgaacctgtcttcctgagagattcctgaataaactgccagcctggcagcctggaatgactccaggcaccaagagtgaaa

SEQ ID NO: 1124 - DNA, 153 bp, Homo sapiens
  misc_feature (1)...(153): n = A,T,C or G
caaaattgaagaagcanagacaaaggagagagagaaaaagaagcataaagtaatgagtgagatcaagaaagaaaatggagatgtaaagattttactgaaaagtgggaaggagaaaccaaaaacaaatatagaagacttacaaattaaaaaagt

SEQ ID NO: 1125 - DNA, 138 bp, Homo sapiens
  misc_feature (1)...(138): n = A,T,C or G
caaaggagagagagannaagaagcatacagtaatgagtgagatcaagaaagaaaatggngatgtaaagattttactgaaaagtgggaaggagaaaccaaaaacaaatatagaagacttacaaattaaaaaagtaaaaa

SEQ ID NO: 1126 - DNA, 170 bp, Homo sapiens
  misc_feature (1)...(170): n = A,T,C or G
ctaaaatcaatgcacaaaattaatgcanaaagacaatagagagaagagaaaaagtangcttnnnagtnctgagtgagatcaagaaaganaatggagatgtaaagattttactgaaaagtgggaaggagaaaccaaaatcaattatagaagacttacctaattaaaaaagt

SEQ ID NO: 1127 - DNA, 164 bp, Homo sapiens
agcctcgtgtcaccttaaaaagaaagacaaagagagagagaaaaagaagcataaagtaatgagtgagatcaagaaagaaaatggagatgtaaagattttactgaaaggtgggaaggagaaaccaaaaacaaatatagaagacttacaaattaaaaaagtaaaaa

SEQ ID NO: 1128 - DNA, 180 bp, Homo sapiens
actgagaaaaatcaaagacaaaattaaagagaaagacaaagagagagagaaaaagaagcataaagtaatgagtgagatcaagaaagaaaatggagatgtaaagattttactgaaaagtgggaaggagaaaccaaaaacaaatatagaagacttacaaattaaaaaagtaaagaaaaaaaa

SEQ ID NO: 1129 - DNA, 160 bp, Homo sapiens
  misc_feature (1)...(160): n = A,T,C or G
cacaaacttaaagagaaagcacaaagagagaagagaaaaagaagcctangagtantgagtgagatcaagaaagaaaatggagatgtaaagattttactgaaaagtgggaaggagaaaccaaaaacaaatatagangacttacaaattaaaaaagtaaaaa

SEQ ID NO: 1130 - DNA, 187 bp, Homo sapiens
  misc_feature (1)...(187): n = A,T,C or G
gactgagataaaatcaaagnacanaattaaagnagcaaagacaaaggagagagagaaaaagaagcatacagtaaatgagtgagatcaagaaaganaanggagatgtaaagattttactgaaaagtgggaaggagaaaccaaaaacaaatatagaagacttacaaattaaaaaagtaaagaaaaaaaa

SEQ ID NO: 1131 - DNA, 182 bp, Homo sapiens
actgagataaaatcaaagacaaaattaaagagaaagacaaagagagagagaaaaagaagcataaagtaatgagtgagatcaagaaagaaaatggagatgtaaagattttactgaaaagtgggaaggagaaaccaaaaacaaatatagaagacttacaaattataaaagtaaggaaaaaaaaa

SEQ ID NO: 1132 - DNA, 118 bp, Homo sapiens
gactgagatcctgtctctacagagaaacggccccgaacggaagttccccagccctccacattcctccaatgggccattcgccccaagactcatccactgagccccattaaaaaaaaaa

SEQ ID NO: 1133 - DNA, 107 bp, Homo sapiens
cctgtctctcagagaaaacggccccgaacggaagttccccagccctccacattcctccaatggccattcgccccaagactcatccacgagccccattaaaaaaaaaa

SEQ ID NO: 1134 - DNA, 167 bp, Homo sapiens
aagacaaaattaaagagaaagacaaagagagagagaaaaagaagcataaagtaatgagtgagatcaagaaagaaaatggagatgtaaagattttactgaaaagtgggaaggagaaaccaaaaacaaatatagaagacttacaaattaaaaaagtaaagtaaaaaaaa

SEQ ID NO: 1135 - DNA, 131 bp, Homo sapiens
  misc_feature (1)...(131): n = A,T,C or G
aaagaagcataacagtnntgagtgagatcaagaaagaaaatggagatgtaaagattttactgaaaagtgggaaggagaaaccaaaaacaaatatagaagacttacaaattaaaaaagtaaagaagaaaaaa

SEQ ID NO: 1136 - DNA, 188 bp, Homo sapiens
  misc_feature (1)...(188): n = A,T,C or G
agcactgaggtctatcatcgncttaattaaagagaaagacaaagcagtaggagagaagannntncatnncagtantgagtgagatcaagaaagaaaatggagatgtaaagattttactgaatagtgggaaggagaaaccaaaaacaaatatagaagacttacaaattaaaaaagtaaagaagaaaaaa

SEQ ID NO: 1137 - DNA, 181 bp, Homo sapiens
  misc_feature (1)...(181): n = A,T,C or G
ctgagataaaatcaaagacaaaattaaagagaaagacaangagagagagaaaaagaagcataaagtaatgagtgagatcaagaaagaaaatggagatgtaaagattttactgaaaagtgggaaggagaaaccaaaaacaaatatagaagacttacaaattaaaaaagtaaagaagaaaaaa

SEQ ID NO: 1138 - DNA, 183 bp, Homo sapiens
  misc_feature (1)...(183): n = A,T,C or G
gactgagataaaatcaaagacaaaattaaagagtaaaggcaaagagagagagaaaaagaagcatanagtaatgagtgagatcaagaaagaaaatggagatgtaaagattttactgaaaagtgggaaggagaaaccaaaaacaaatatagaagacttacaaattaaaaaagtaaagaaaaaaaa

SEQ ID NO: 1139 - DNA, 170 bp, Homo sapiens
aaagacaaaattaaagaggaaagacaaagcagcagagagaaaaagaagcataaagtaatgagtgagatcaagaaagaaaatggagatgtacagattttactgaaaagtgggaaggagaaaccaaaaacaaatatagaagacttacaaattaaaaaagtaaagaaaaaaaa

SEQ ID NO: 1140 - DNA, 143 bp, Homo sapiens
gaaagacaaagagagagagaaaaagaagcataaagtaatgagtgagatcaagaaagaaaatggagatgtaaagattttactgaaaagtgggaaggagaaaccaaaaacaaatatagaagacttacaaattaaaaaagtaaaaa

SEQ ID NO: 1141 - DNA, 167 bp, Homo sapiens
gagataaatcaaagacaaaattaaagagcaaagacaaagcagagagagaaaaagaagcataaagtaatgagtgagatcaagaaagaaaatggagatgtaaagattttactgaaaagtggggaggagaaaccaaaaacaaatatagaagacttacaaattaaaaaaaa

SEQ ID NO: 1142 - DNA, 157 bp, Homo sapiens
  misc_feature (1)...(157): n = A,T,C or G
aatcaagacaaaattaaagagaaagncaaagagagaganaaaaggaagcataaagtaatgagtgagatcaagaaagaaaatggagatgtaaagatnttactgaaaagtgggaaggagaaaccaaaaacaaatatagaagacttacaaattaaaaaag

SEQ ID NO: 1143 - DNA, 176 bp, Homo sapiens
  misc_feature (1)...(176): n = A,T,C or G
gactgagataaaatcaaagacaaaattaaagagaaagacaaaggagagagagaaaaagaagcataaagtaatgagtgagatcaagaaagaaaatggagatgtaaagattttnctgaaaagtgggaaggagaaaccaaaaacaaatatagaagacttacaaattaaaaaagtaaaaa

SEQ ID NO: 1144 - DNA, 167 bp, Homo sapiens
ataatcaaagacaaaattaaagagtaaagacaaagagagagagaaaaagaagcataaagtaatgagtgagatcaagaaagaaaatggagatgtaaagattttactgaaaagtgggaaggagaaaccaaaaacaaatatagaagacttacaaattaaaaaagtaaaaa

SEQ ID NO: 1145 - DNA, 183 bp, Homo sapiens
gaactgagataaaatcaaagacaaaattaaagagaaagacaaagagagagagaaaaagaagcataaagtaatgagtgagatcaagaaagaaaatggagatgtaaagattttactgaaaagtgggaaggagaaaccaaaaacaaatatagaagacttacaaattaaaaaagtataaaaaaaaaa

SEQ ID NO: 1146 - DNA, 183 bp, Homo sapiens
  misc_feature (1)...(183): n = A,T,C or G
gactgagataaaatcaaagacaaaattaaagagaaagactaagagagagagaaaaagaagcataaagtaatgagtgagatcaagaaagaaaatggagatgtaaagattttactgaaaagtgggaaggagaaaccaaaaacaaatatagnagncttacaaattaaaaaagtaaagaagaaaaaa

SEQ ID NO: 1147 - DNA, 165 bp, Homo sapiens
  misc_feature (1)...(165): n = A,T,C or G
atcaaagacaaaattaaaggganagacaaaggagaagagagaaaaagaagcttaaantnatgancganatcaagaaagaaantggagatgtaaagattttactgaaaagtgggaaggagaaaccaaaaacaaatatagaagacttacaaattaaaaaagtaaaaa

SEQ ID NO: 1148 - DNA, 185 bp, Homo sapiens
gactgagataaaatcaaagacaaaattaaagcagaaagacaaagcagagagagaaaaagaagcataaagtaatgagtgagatcaagaaagaaaatggagatgtaaagattttactgaaaagtgggaaggagaaaccaaaaacaaatatagaagacttacaaattaaaaaagtaaagaagaaaaaa

SEQ ID NO: 1149 - DNA, 170 bp, Homo sapiens
  misc_feature (1)...(170): n = A,T,C or G
gactgagataaaatcaaagtacaaaattaaagagaaagacaaagcagagagaaaaagaancatatagtnatgagtgagatcangaaagaaaatggngatgtgtagattttactgnnaagtgggaaggagaaaccncaaacacatatanaagacttacacattaaaaaaaa

SEQ ID NO: 1150 - DNA, 111 bp, Homo sapiens
  misc_feature (1)...(111): n = A,T,C or G
gactgagatcctgtctctacagnagaaaacggacccgaacggaagttccccagccctccacattcctccaatggccattcgccccgaagactcatccacgagccccattaa

SEQ ID NO: 1151 - DNA, 157 bp, Homo sapiens
  misc_feature (1)...(157): n = A,T,C or G
agactgaggctgagaggagatcccagcntgccttcactcacaagatctggcagccagagccccgagtcccccaagcccagtgagcagttcaaatataaaaccgcacataacaagaaaagtgaagcaccatgaaactcttgtttgattaaaaaaaaaa

SEQ ID NO: 1152 - DNA, 189 bp, Homo sapiens; identical to SEQ ID NO: 353

SEQ ID NO: 1153 - DNA, 201 bp, Homo sapiens
gtctggggagctcctgcattaagtcagactgagataaaatcaaagacaaaattaaagagaaagacaaagagagagagaaaacgaagcataaagtaatgagtgagatcaagaaagaaaatggagatgtaaagattttactgaaaagtgggaaggagaaaccaaaaacaaatatagaagacttacaaattaaaaaagtaaaaa

SEQ ID NO: 1154 - DNA, 212 bp, Homo sapiens
  misc_feature (1)...(212): n = A,T,C or G
gacgtctggggagctcctgcattaagtcagactgagntagaatcanagacanaattaagggcangncnnagnntatagaganaaagangcataacgttntgagtgagatcaagaatagaaaatggagatgtaaagattttactgagaagtgggaaggagaaaccaaaaacaaatatagaagacttacaaattaaaaagtaaagaagaaaaaa

SEQ ID NO: 1155 - DNA, 319 bp, Homo sapiens
  misc_feature (1)...(319): n = A,T,C or G
gacgtctggggagctcctgcattaagtcagactgagntaaaatcaaagacaaaattaaagagaaagacaaagagagagagaaaaagaagcataaagtaatgagtgagatcaagaaagaaaatggagatgtaaagattttactgaaaagtaagttatattgagtgaatgttttctacattgcatactatcctgtatatttattagccaagctgttaaaataagaagtgttacttgataccaatatttgctaagagtaattatgctgtgagtgcagagcaagtccaggggttgggaattgtaatctgcgtgggactgtgct

SEQ ID NO: 1156 - DNA, 168 bp, Homo sapiens
  misc_feature (1)...(168): n = A,T,C or G
ctaaaatcaaagacaaaattaaagagaaagacaaanagagagagnaaaagaagcataaagtaatgagtgagatcaagaaagaaaatggagatgtaaagattttactgaaaagtgggaaggagaaaccaaaaacaaatatagaagacttacaaattaaaaaagtaaaaa

SEQ ID NO: 1157 - DNA, 146 bp, Homo sapiens
  misc_feature (1)...(146): n = A,T,C or G
aaagacaaagttttgagaaagacatccagagagagannnagangcatagagnaatgagtgagatcaagaaagaaaacggagatgtaaagattttactgaaaagtgggaaggagaaaccaaaaacaaatatagaagacttacaaatt

SEQ ID NO: 1158 - DNA, 158 bp, Homo sapiens
  misc_feature (1)...(158): n = A,T,C or G
ataaaatcaaagacaaaattaaagagaaagacaanntagagagagaaagggaagcataaagtaatgagtgagatcaagaaaggaaatggagatgtaaagatttatactgaaaagtgggaaggagaaaccaaaaacaaatatagaagacttacaaatta

SEQ ID NO: 1159 - DNA, 142 bp, Homo sapiens
  misc_feature (1)...(142): n = A,T,C or G
aaagacaaggagagagnggaaangaagcataaagtaatgagtgagatcaaganagaaaatggagatgtanagattttactgaaaagtgggaaggagaaaccaaaaacaaatataggagacttacaaattaaaaaagtaaaga

SEQ ID NO: 1160 - DNA, 146 bp, Homo sapiens
  misc_feature (1)...(146): n = A,T,C or G
gagaaagacaaagagngagaganaggaagcctnttgtaatgagtgagatcaagaaagaaaatggagatgtaaagattttactgaaaagtgggaaggagaaaccannntcaaatatagaagacttacaaattaaaaaagtagaaaaa

SEQ ID NO: 1161 - DNA, 167 bp, Homo sapiens
  misc_feature (1)...(167): n = A,T,C or G
ataatatcaaagccanaattaaagagaangacaangagagagagaanangaagcntaaagtaatgagtgagatcaagaaagaaaatggagatgtaaagattttactgaaaaggtggganggagaaaccaaaaacaaatatnaggagacttacaaatttaaaaaagta

SEQ ID NO: 1162 - DNA, 167 bp, Homo sapiens
ataaatcaagacaagattaaagagaaagacaaagagagagagaaaaagaagcataaagtaatgagtgagatcaagaaagaaaatggagatgtaaagattttactgaaaagtgggaaggagaaaccaaaaacaaatatagaagacttacaaattaaaaaagtaaagaa

SEQ ID NO: 1163 - DNA, 145 bp, Homo sapiens
  misc_feature (1)...(145): n = A,T,C or G
tcaaagacaaaattaaagagaaagacaangagagagagaaanngangcataaagtaatgagtgagatcaagaangantttggagatgtgaagattttactgaaaagtgggaaggagaaaccaaaancanatatagaagacttaca

SEQ ID NO: 1164 - DNA, 147 bp, Homo sapiens
  misc_feature (1)...(147): n = A,T,C or G
aatcaaagacaaaattaangagaaagacaaagagagagagaagggangcgtnaagtantgagtgagatcaacanaganaatggagatgtaaagattttactgaaaagtgggaaggagaaaccaaaaacaaatatagaagacttacaa

SEQ ID NO: 1165 - DNA, 105 bp, Homo sapiens
  misc_feature (1)...(105): n = A,T,C or G
gacaaagtgagagagaaannganacataaagtaatgagtgagatcaagaaagannntggagatgtanagattttactgaaaagtgggaaggagaaaccaaaaaca

SEQ ID NO: 1166 - DNA, 168 bp, Homo sapiens
ataaaatcaaagacaaaattaaagagaaagacaaagagagagagaaaaagaagcaaaaagtaatgagtaagatcaagaaagaaaatggagatgtaaagattttactgaaaagtgggaaggagaaaccaaaaacaaatatagaagacttacaaattaaaaaagtaaaaa

SEQ ID NO: 1167 - DNA, 167 bp, Homo sapiens
  misc_feature (1)...(167): n = A,T,C or G
cataaaatcaaagacaaaattaaagagaaagacaaagagagagagaaaaagaagcataaagtaatgagtgagatcangaaagaaaanggagatgtaaagattttactgaaaagtgggaaggagaaaccaaaaacaaatatagaagacttacaaattaaaaaagtaaa

SEQ ID NO: 1168 - DNA, 168 bp, Homo sapiens
gtaaaatcaaagacaaaattaaagaggaagacaaagagagagagaaaaagatgcataaagtaatgagtgagatcaagaaagaaaatggggatgtaaagattttactgaaaagtgggaaggagaaaccaaaaacaaatatagaagacttacaaattaaaaaagtaaaaa

SEQ ID NO: 1169 - DNA, 192 bp, Homo sapiens
  misc_feature (1)...(192): n = A,T,C or G
gagctcctgcttaagtcagactgagntaaatcaaagacaaacttancgagaatgacanagagagagagaanangaagcataaagtaatgagtgagatcaagaaagaaaatggagatgtaaagattttactgaaaagtgggaaggagaaaccaaanacaaatatagaagacttacaaattaaaaaagtaaaaa

SEQ ID NO: 1170 - DNA, 175 bp, Homo sapiens
taaaatcaaagacaaaattaaagagaaagacaaagagagagagaaaaagaagcataaagtaatgagtgagatcaagaaagaaaatggagatgtagagattttactgaaaagtgggaaggagaaaccaaaaacaaatatagaagacttacaaattaaaaaagtaaagaagaaaaaa

SEQ ID NO: 1171 - DNA, 154 bp, Homo sapiens
  misc_feature (1)...(154): n = A,T,C or G
tctggggagctcctgcattaagtcagactgaggtaaaatcaaagacaaaattaaagagaaagacanagagagagagaaaatgaagcataaagtnatgagtgagatcaagaaagaaaatggagatgtaaagattttactgcaagtgggaaggaga

SEQ ID NO: 1172 - DNA, 154 bp, Homo sapiens
gcgaaatgacaaagagagagagaaaaagaagcataaagtaatgagtgagatcaagaaagaaaatggagatgtaaagattttactgaaaagtggggaggagaaaccaaaaacaaatatagaagacttacaaattaaaaaagtaacagaaaaaaaa

SEQ ID NO: 1173 - DNA, 201 bp, Homo sapiens
  misc_feature (1)...(201): n = A,T,C or G
tctggggagctcctgcatttagtcagactgagntaaaatcaaagacaaaattaaagagaaagacaaagagagagagaaaangaagcataaagtaatgagtgagatcaagaaagaaaatggagatgtaaagattttacttgaaaagtgggaaggagaaaccaaaaacaaatatagaagacttacaaattaaaaaagtaaaaa

SEQ ID NO: 1174 - DNA, 175 bp, Homo sapiens
ctaaaatcaaagacaaaattaaagagaaagacaaagagagagaggaaaagaagcataaagtaatgagtgagatcaagaaagaaaatggagatgtaaagattttactgaaaagtgggaaggagaaaccaaaaacaaatatagaagacttacaaattaaaaaagtaaagaaaaaaaa

SEQ ID NO: 1175 - DNA, 172 bp, Homo sapiens
  misc_feature (1)...(172): n = A,T,C or G
aatcaaagacaaaattaaagagaangacaaagagagagagaaaaagaagcatagagtaatnagtgagatcaagaaagaaaatggagatgtaaagattttactgaaaagtgggaaggagaaaccaaaaacaaatatagaagacttactaanttaaaagagtaaataaaaaaaa

SEQ ID NO: 1176 - DNA, 199 bp, Homo sapiens
  misc_feature (1)...(199): n = A,T,C or G
gcgtctggggagctcctgcattagtcagactgaggtagantcaangtcanaattaaagngaatgacncagagagagagaatngagaggcntaatgtaatgagtgagatcaanaaagaaaatggagatgtaaagattttactngaaancgtggnanggagaaaccaaangcaactatngtaagacttacaaattacgaac

SEQ ID NO: 1177 - DNA, 160 bp, Homo sapiens
ccttaaagagaaagacaaagagagagagaaaaagaagcataaagtaatgagtgagatcaagaaagaaaatggggatgtaaagattttactgaaaagtgggaaggagaaaccaaaaacaaatatagaagacttacaaattaaaaaagtaaagaagaaaaaa

SEQ ID NO: 1178 - DNA, 185 bp, Homo sapiens
  misc_feature (1)...(185): n = A,T,C or G
gtgacctcctgcttaagtcagactgagnnaaatcaangacaaaattaaagagaaagacaaagagagagagaaaangaagcntaaagtaatgagtgagatcaagaaagaaaatggagatgtaaagattttactgaaaagtgggaaggagaaaccaaaaacaaatatagaagacttacaaattaaaa

SEQ ID NO: 1179 - DNA, 170 bp, Homo sapiens
  misc_feature (1)...(170): n = A,T,C or G
ctggataaatcaagacaaaattaaagagaaagacaaagagagagagaaaaagaagcataaagnaatgagtgagatcaagaaagaaaatggagatgtaaagattctactgaaaagtgggaaggagaaaccaaaaacaaatatagaagacttacaaattaaaaaagtaaaaa

SEQ ID NO: 1180 - DNA, 168 bp, Homo sapiens
ataaaatcaaagacaaaattaaagagaaagacaaagagagagagaaaaagaagcataaagtaatgagtgagatcaagaaagaaaatggagatgtaaagattttactgaaaagtgggaaggagaaaccaaaaacaaatatagaagacttacaaattaaaaaagtaaaaa

SEQ ID NO: 1181 - DNA, 177 bp, Homo sapiens
  misc_feature (1)...(177): n = A,T,C or G
gacgtctggggagctcctgcattaagtcagactgagataaaatcaaagccacaattanngagacgacanagagngagagaanaganncataaagtantgagtgagatcangaaagaaaatggagatgtaaagattttactgaaaagtgggaaggagaaaccaaaaacaaatatagaa

SEQ ID NO: 1182 - DNA, 169 bp, Homo sapiens
ttaaaatcaaagacaaaattaaagagaaagacaaagagagagagaaaaagaagcataaagtaatgagtgagatcaagaaagaaaatggagatgtaaagattttactgaaaagtgggaaggagaaaccaaaaacaaatatagaagacttacaaattgaaaaagtaaaaaa

SEQ ID NO: 1183 - DNA, 203 bp, Homo sapiens
  misc_feature (1)...(203): n = A,T,C or G
gcttctggggacctcctgcttaagtcagactgagcnaaaatcaaagacaaaattaaagagaaagacaaagagagagagaaannngaagcataaagtaatgagtgagatcaagaaagaaaatggagatgtaaagattttgctgaaaagtgggagggagaaaccaaaaacaaatatagaagacttacaaattaaaaaagtaaaaa

SEQ ID NO: 1184 - DNA, 172 bp, Homo sapiens
ttcccctgtgccaccactctgggccttttaatgccaagaaagaattcagccgcagaagaccttggagatggtggcggacgtgcagaatgatgcctggaccttgccttaaccatggaccccgcccacccaaacccttccgtagcactaaagttcgtggactgaaaaaaaaaaa

SEQ ID NO: 1185 - DNA, 103 bp, Homo sapiens
gtctcagaagtcagaagaggtcagtcagctcccctggtggagctggagctacaagcaactgtgaaaactactctgcatattactcttcaaaagcagtaacaag

SEQ ID NO: 1186 - DNA, 189 bp, Homo sapiens
  misc_feature (1)...(189): n = A,T,C or G
tgagactgagcttggctgangagaataaaactgagcaggaggtggtggagggaatggatatctctactcgctccaaagatcctgtctctacagagaaaacggccccgaaacggaagttccccagccctccacattcctccaatggccattcgccccaagactcatccacgagccccattaaaaaaaaaa

SEQ ID NO: 1187 - DNA, 170 bp, Homo sapiens
  misc_feature (1)...(170): n = A,T,C or G
gagaataaaaactgagcaggaggtggtggagggaatggatatctctactcgctccaaagatcctgtctctacagagaanacggccccgaaacggaagttccccagccctccacattcctccaatggccattcgccccaagactcatccacgagccccattaaaaaaaaaa

SEQ ID NO: 1188 - DNA, 187 bp, Homo sapiens
agactgagcttggctgagagaataaaaactgagcaggaggtggtggagggaatggatatctctactcgctccaaagatcctgtctctacagagaaaacggccccgaaacggaagttccccagccctccacattcctccaatggccattcgccccaagactcatccacgagccccattaaaaaaaaaa

SEQ ID NO: 1189 - DNA, 157 bp, Homo sapiens
  misc_feature (1)...(157): n = A,T,C or G
gcacaccgcacagaattgccaattcaggaagtgttctgattgggaatccatatacccctgcacccgcantggtcactcacactcacatagctgangctgctggcctgggttcccagtgatggaaaacgagctagagaatttatagactctggttttt

SEQ ID NO: 1190 - DNA, 189 bp, Homo sapiens; identical to SEQ ID NO: 353

SEQ ID NO: 1191 - DNA, 255 bp, Homo sapiens
  misc_feature (1)...(255): n = A,T,C or G
gaacacacaatacagcattccaagaaaaccncntgctgtgaaggagcaagataccacacggactctngnnttggacttgnagntttttcacagggtctcanaancctcacacaggcttcncggaccatgtncnnncaatgggaacaccnnacctcggaatctgagcacagagcagcatggcgggaaactattgcactacagctttctgtatcaggagaaaanggagangagttctccttgcttgcacaaagtgga

SEQ ID NO: 1192 - DNA, 111 bp, Homo sapiens
  misc_feature (1)...(111): n = A,T,C or G
catatacccctgcacccgcaatggtcactcatactcacatanntgaggctgntgnctgggtctcccagngatanaaaacgagctagagaatttatagactctgatttttca

SEQ ID NO: 1193 - DNA, 251 bp, Homo sapiens
  misc_feature (1)...(251): n = A,T,C or G
gactgagtgagaaagganagtgcaaagctgtgtccattttcctccattctgtgatgttccctggaatcactgcttcagtaaacttaactgtgagtagatatacgctgagtcatcaaagtccccaaactgaatccccaaacttaagcatggccttggggacctccaacccccccactgcaatgagaaatgtactttgtgggacaggatgagggaagaatacatgacaatcaaattccttttaaaaaaaaaaa

SEQ ID NO: 1194 - DNA, 215 bp, Homo sapiens
  misc_feature (1)...(215): n = A,T,C or G
ttagtacacgggtccacaatacccttttcctattaaaccttctttacccgctacttntggttggaggnttagaagggaggttgaagnagacaacaaancctcaataacgtggtctnagtgnaaaganaagacaaaanttggcaagctcatcattacattgggtaagaaacacaagagaaggaacgagtcttccgatgagctgccgatgccgagca

SEQ ID NO: 1195 - DNA, 254 bp, Homo sapiens
  misc_feature (1)...(254): n = A,T,C or G
gactgagctccaggaggagactggtaaacagcgtgagaatgatcgggactggggacactgcagatgttttctgttccgngtcttgttttgctgaaagcggnttacacagncactctctcctagtcttttcccaggcagacagaacacaggggactggccatgttcctccccccacccccacccgccatgcatccttcagtttgactctgncatctattgcttgaatgattaaagcgaaatcagataaaaaaaaa

SEQ ID NO: 1196 - DNA, 519 bp, Homo sapiens
  misc_feature (1)...(519): n = A,T,C or G
aagtactgaggccctaccacttggtctggccctgctccagcttgacaatagcaagaaagcttcggcaggaagatgagggagaagcgtcatctcagaaggcccctgaaggcctcacaggaacatgactcaggccgtgactgcacgccagcacttcgggaggcccacagcttgctgactcaggctctctccacccaggctctaatttccagggcctcgaggaagagttcccgagggagacaatgctcctcacaggaagtnggacaagcaaggaagcagagccttcgcccctccagctgactgagaaggctgagcatggcttggcctgcgttcccattagcaaacaaggacacaggggcttccctgaaacacatcatcatcccagagcagagacaaaggactgccccggatagagaggagaccttctaggtccatagacaaatggctgtttataaaggtaaaaggggaaaccctgtgttaggatgaggtgttnaattttaattggacatgttacttaggtac

SEQ ID NO: 1197 - DNA, 288 bp, Homo sapiens
  misc_feature (1)...(288): n = A,T,C or G
gactgagcgctgcaagtagccctgtgttttcatctgggtatggccactcctgtgagactgagctccatggcccaggacccctaaacacaggcttgtcttcctcgcagatagacagccatcttggacttcccaaaccgctgcatactttccctccggagaagccagggctcttgtgggtggtgtccccccntccccaaacacccctttaataactgtttacaacttttaaaaatcagctttgagataatgagatacactttaagtaaaaatacacttcaaccatctaaa

SEQ ID NO: 1198 - DNA, 102 bp, Homo sapiens
  misc_feature (1)...(102): n = A,T,C or G
gaactgaggctggagaggnggntcaacggttaagggtgccanctgntcttntgaaggttctgagttcangtcccagncnccacatgatcgggtcacaacaat

SEQ ID NO: 1199 - DNA, 200 bp, Homo sapiens
  misc_feature (1)...(200): n = A,T,C or G
ttactttttgtggaactctcaaaggtcggacaggagacatggagtggntccatatatctantgcctcgacntngatncaattngagctcgctgccctgcagancgnngttcctattctgaantncctattgtgtnacaaattntaaggancttgtngacctgcaggcnttgcaagctacaggagggtcggacggtttgag

SEQ ID NO: 1200 - DNA, 539 bp, Homo sapiens
actgaggtgtgagactacgctgcacaaagaccccagctctggaagcggaagacttcctgaagtcttcacaaagacagcacttctcaaagaaaggaatggaacagctttgctccctggcttcctggctgggacctgcatcaggactgataccggttgaggatagtggttaccagtcatcggtgttgccttacaagtcctacggcaactgttactgtctttgtgtttctgtcaccccaggtttgctggtatactgcacacagaagctccatcaaaccctgaaaacctgactgactgactccaggctgactttacaagggtgagcagctgtataaggtgatgctggccgccttgtcagctcctggagttacagtagacttttttctttcaggccaggctgatcttgacctacaaggccttctgcttcaacctctgaagtgctgggaattataggtgtgtgccaccacacccagcctgtatttgggtttgaacccccatgatcacccatcatctcagtctacctagaatgccagcgtctccca

SEQ ID NO: 1201 - DNA, 123 bp, Homo sapiens
  misc_feature (1)...(123): n = A,T,C or G
gcacttggcactcactcttaaccagcactggggatcttactggtcctggggcccccgacctccnnttntggccgggtggacacaggcgctctaacaccggatggngaggctccacttgaggac

SEQ ID NO: 1202 - DNA, 364 bp, Homo sapiens
  misc_feature (1)...(364): n = A,T,C or G
tgaggctgaactcacaggaatcaaatggctgtaggtacaattttggagggcacggggactgtggacccataatttcagccccagcccaagatgatccaatcctgttaagtttcatccgctgtctgcaagccaacctgctgtgtgtatggcgtcgtgatgtcaagccagattgcaaagagctctggatattctggtggggagatnacccnacctnangggannaannnnttatnaactngnnggnaaggatttttantttttttaaaananattnatatnnnnttntgctgccgccacctaatgtnnnntgcttgcctgcnttcctttcatgtgagatgaccacagctggcctccagcctccata

SEQ ID NO: 1203 - DNA, 346 bp, Homo sapiens
  misc_feature (1)...(346): n = A,T,C or G
tacacccggaacagatctgnggcnngcatcaggccgcgcatgtactccatgcanncctcctcttccatacagtatctggatgtatggcttgaagagtgagcctgaactggcacatncggcaaanaacagcacctgntacctccagattccaggcgcttcccacaccacccaagcgaggaagcctttnaaggggaggattctgagcctcagagagtcattgcacacgcacacgcacacgcacacacacaaaatcccgtaaccaggaacaaggagatctggagaaggccaccctccggatcatttgggttgcgactgtcaagatatctgagattgggggggagggtat

SEQ ID NO: 1204 - DNA, 162 bp, Homo sapiens
  misc_feature (1)...(162): n = A,T,C or G
tgaggcgtttctttgcaaataacagcttggaggcgacactcgcggaggaaacgaggcttgcacggagtacccagctcgccngccccncccccagggactctggtgctgaagaccctcgccctccgcccggtttcggaattactggttttaaaatcgaaatca

SEQ ID NO: 1205 - DNA, 413 bp, Homo sapiens
  misc_feature (1)...(413): n = A,T,C or G
gactgaggctccttggatttaacttctgcaagnctgtatcaccagcctctgttagaaagtcctcctgcgtccaagaaaagtgatttttctaaagatgctgtagttcggcagttacctttgaataaaacagaagagaacaacgcaccaaaagcanntgacntctttatttctcaanacaccatgggnacaganagatgctctgacaacctgttntaaagcaaaaagctcagagcatgcctgtgtttaaggcggcgaaagaacatntttttgaacnacncgagnacggagaaaantactgtggctnaggagactgannctccnccantaagnatcggancagntacagctgtgggttgcgacnactgccgctgccatcgcancagcagctcctttgatcaaggtacagagcgatt

SEQ ID NO: 1206 - DNA, 151 bp, Homo sapiens
  misc_feature (1)...(151): n = A,T,C or G
aactcgctctgtagactaggctggcctggaactcagagaggaccganacaggctgactccatgacaggcttcaaactggtagttgtggagactagacctaaatttctaggcctgggcaagactgttcaagtcggttactaaataaaaaaaa

SEQ ID NO: 1207 - DNA, 230 bp, Homo sapiens
  misc_feature (1)...(230): n = A,T,C or G
gaggctggctgctttgacaacttatcagattctttattagtggtaaaactgaaccggaaccgaattagcatgattccacccaaggtcttcaagctgcctcatctccagttcttagaactggaacataatanccttacaggagtgaacagggggnggctatatggcttgngaatgttacagcnactgnatatgagccagaatggctattgaaaantcagccccggtgcatg

SEQ ID NO: 1208 - DNA, 189 bp, Homo sapiens
  misc_feature (1)...(189): n = A,T,C or G
tcagcacctgcccaccagtaatggaactnactcnaagcatacagngcgtcctctcttgntcatggccaggnngcaagacgcagngacaacgcctgatgncagatgccggtnttnagnanaccnagcnntgccnagaggcctggcctccgngcatcaggatgagancaaagagaacgactgggactggcc

SEQ ID NO: 1209 - DNA, 324 bp, Homo sapiens
  misc_feature (1)...(324): n = A,T,C or G
tactgagcctatatgaaaacatctttaatatggactggagtgatggtttagtgggaagatcacctgccatgcaagcacgaaggctggagttttgacccacagaatgcagtctgtaatcgagagtctctggaagctcgtgggccgggtgtatgaagtggtgacgagatcctgtcttaaaccagntagaaggtaagggtagacacccagagttgttctttgacctctatacacatgcggtggcacatggacaactgtacacacataaacacaaacatattaacatacacaaatattaaataaagatgtgggagaatgaaaaaaaaa

SEQ ID NO: 1210 - DNA, 515 bp, Homo sapiens
  misc_feature (1)...(515): n = A,T,C or G
attactgatgaacggtactccacgttatcgccagcatcgccctcacctcnacgtgggactcgccgaaggatgcccaccatcccangaggatctngccaaccctcacaaggcgnnagcaananccnccgcacaccgcgccgtncagcaaagagganaatcnattcatactgaggtnatcncnacagagnatttgcttggcncgccaatatcccnccgttcttctgctcctccgtattaangcannactttagnnggggagtcccacttgggcatacccttcttnacactcaggngcagcttttgctagccggngcaaacctcacagccagggggaggcctttgtggacatnttctccttcannctgctttgatntcctctggangnanggccaaggtnccaagccttntnantttctccaccctaaaantttttagcacgttccctgtattgacaccctgttactcggnaananaangctcttncttacaactgcctccaaccctacagaccacct

SEQ ID NO: 1211 - DNA, 338 bp, Homo sapiens
  misc_feature (1)...(338): n = A,T,C or G
gactgaggtggggtctttcccctggcttcctctgctgggcctcacctccttgctgacactgaagaagcaaaagaattgagaaatctggggcagctgtgngaatgcacactgctgaggaggagcagcccctggtaacttggcaagctggtagctcgctcgctcgctcagccgaatgggctgaatgagtgggccagagcctgagcgtgagccggagcccagggtgcccatgggtatcacccagccagaggtaaaagggcctggatgtctgggaggtggganaaaggttagtagattcaanaggccaatgcctnactttgggccaaaaagaaatacattgg

SEQ ID NO: 1212 - DNA, 316 bp, Homo sapiens
  misc_feature (1)...(316): n = A,T,C or G
gactgaggtgctgctgtctggactcattggtgttgtttcctggaagaggcctctctcgcttgtgattacctncttnatgctgttntcgncagtgngcnngatgctcaacctggccggatcnatcctctcctgncagaacggcccagntnggtcanctncctcaaaggctagccagtngatnaagtgctgacagtngtggaggtntngcgtatagnngtcnagctgnannaccactnattcggatgcaggaactctcggggagacactgaagcttgaacccactagcaggaaaactgtaacgctgtgcggctgacct

SEQ ID NO: 1213 - DNA, 212 bp, Homo sapiens
  misc_feature (1)...(212): n = A,T,C or G
gcctccggcctcccctccaaacctgcggtttcacctggatgcacagggacaggtgctgcagaaacctgggatcacttgacatcggtgggtaccacccacacagccacacagaccttctacttcctggtacctccagaggctgaggtgggcacctttctccaggcaaaagagaacccagagttagcgggangtggaggcagaatgactttaat

SEQ ID NO: 1214 - DNA, 141 bp, Homo sapiens
  misc_feature (1)...(141): n = A,T,C or G
gatctgtgttgacccangtcttgngggagcaaaagcatgggtaggagtgacgacgncngnganagcttgganaagagatntcagacttaccttggntnagcgnnaccaattattggcttatatgaagaaatggggagagtc

SEQ ID NO: 1215 - DNA, 407 bp, Homo sapiens
tgagggatactctgacacccagttcatcactgtgacagcccagtggagcactgtgacatcacagtggagttatgacacaacaatggagcattgtgacaccacagtggagttctgagccaccactctgaagcactgtgagaaaacattacagcactcttacatcatcctggagcactggaacagtgcagtgtacctctgtgataccacagtggagcactgtgacaccaaagtggagcactgtgacaccaaagtggagcactgtgacagccagtggaccactgtgacataacagtggagtactgtgacacaatactcgagcactgtgacagaaccgtggagttctgagtcaccactgtgcagcactgtgacaaaatattacagcagtgttacaccttcaaaaaaaaaaa

SEQ ID NO: 1216 - DNA, 305 bp, Homo sapiens
  misc_feature (1)...(305): n = A,T,C or G
tccacacatgcagcagctgaggggctttatagatcactaattncngtccaacgaatggnnacantccacttgttgnctttcnagnntcnagcaccaactcnccaacacnnatnttaccgnnaaccttngggccaananatagncgatacgctggaccccaaatgattatanancncacgcncttgagaattgccaattcaggaagtgttgttgantgngaatccatatacnnctgcacccgcaatggtcactcanactcacatagctgaggctgctggctgggttcccagtaaacgaagcaaaaa

SEQ ID NO: 1217 - DNA, 104 bp, Homo sapiens
  misc_feature (1)...(104): n = A,T,C or G
atgagcgggaccgagtgcaaaanaaacattcaccaagtgggtcatcaaacactngatgaaggnccncangcncagagctagaangcataatagatatgcacatt

SEQ ID NO: 1218 - DNA, 394 bp, Homo sapiens
  misc_feature (1)...(394): n = A,T,C or G
gactgaggggagctccttcaaccagtatcactcctctccccgccagagtaagcagggcccagctcatagagccgagggggcaactcagacaagctgaatttccaagactcaagagaagggaatctgcaagatgactcaaaccagagcagcgtgcctggaagaagcanaaaccagacgagctggaagagataggatcaacccgaggcgcctgggaagaagtgcccgacctgcttcgttgcctgcaggctgtgcagtgtgctcctgagaactgtcacccatgctggggcgggccttcatgatgcagctgtcttttaaacatctctgtaagtgctacccctcacccacattcctgtaagtgacttcaataaaacccattgcttcatcaaaaaaaaaa

SEQ ID NO: 1219 - DNA, 495 bp, Homo sapiens
  misc_feature (1)...(495): n = A,T,C or G
tttcgtagagggccatanctncagcatcccagccactgccacctncangtcaatgctcangccnagccttgcagccantcaaagccanggaactcttccccaaacggacgantcccggagcttccccttctttttccccggtcacaccccccggcccctgggcctagantctagcctgtgagcccccacttccantccttagctntttctgcagcttccagcggtgcctgggtgtccgagagcctgaganccagacggtcccagccctgtgacaaacagatgcgggaccccaccaaccctacagctcagtggttaggaggtctttactgctctaccaggaggttgagttcggttcccaacactcatgtcacataactcacaagcacgtgtaactctaaggaaccattccttcccacttctgacctctgaagggcagacacactaataaacatacacacattcaataaataaataaatcttttaaaaggaaaaaaa

SEQ ID NO: 1220 - DNA, 289 bp, Homo sapiens
  misc_feature (1)...(289): n = A,T,C or G
tcccagaaaccacatggnggncntcacaacccgncnaancaagcgctgacnccctnttntggtgtgtctgaaganagcgtacagtttaccttatttataataataaaaaatctttgggctgnancaagcggancctgacatggagcgagtggggcctaaattttaaaaaaattttttttcttttttcantacttaaaaatgccacctttgtagctgtattntggaaagtgcccaactggcatgacattttctatatatgttaataaagctgagttttctaaccacctaa

SEQ ID NO: 1221 - DNA, 244 bp, Homo sapiens
gactgagtgttttgcctgtgtgtatatatgtacacgtatgtacaccatgtcatgagcctccatggtcgtgagaggactttggatcccttggaactggcgttacattggtcgtgagcctccatgttggcgctgagaagcaaacctgggttctctggaagcgcagcaagtgctcttaaccatcgagccatctctccatctcaaaccacccatgtatataaaatgaaaatacataaaccaaaaaaaa

SEQ ID NO: 1222 - DNA, 277 bp, Homo sapiens
  misc_feature (1)...(277): n = A,T,C or G
gactgagggactctggcaagaggcgctgccttgcctatgaggaagctgaagcacagagagattatggcactggtggggaccgganagatgtctcattaggctaagcctctcctgtccttgntgaggacctgaattnanttgccagcagctcacaaccanntggaactccanctccgggggatctgacaccctcttctgcccttctagaactaccatattcatgtgcacacactcatatacaaatcacttaaaatacaaataaacattctactaaagg

SEQ ID NO: 1223 - DNA, 496 bp, Homo sapiens
  misc_feature (1)...(496): n = A,T,C or G
tgaagcactcccgcttgcttggacnctccntagtgcgangcggngtaactcaaantagcttcaggaggtccctgaaactgaccagacgtcacctaggcccctcccttctgagaactaagcaatacagacctgagagtccaccctcagactgcctgagctgcacagaagactgaggcagctgagcagccaggactcaagcaagctgagccttcaaagaagattctcagaggagaaaaccagcgaagacaactcagaccagatcagcttcctggaagaggtttagcctggaaacctgaggcacctggaaaggacactcttcaacctgtggagctgcctgatgactgtgcaatgcgcttcaggtttcccactgtgtgagctgtcacccatgctggagtgggctttcgtaatatagctgtctttgagttatttctgttcttgtaactaacccctcatccatacttctgtaggtaatccaaatgaactcaattgttcacca

SEQ ID NO: 1224 - DNA, 233 bp, Homo sapiens
  misc_feature (1)...(233): n = A,T,C or G
cacacgttggagaaacgatntgcagcctggcnnanncatgcctctgccancagagcntgaggcaaatcatagtcagctgctgcnntagcagccccatagcaccacacctgggattaaaatgaaaatgtataatattccagaattttcactatactttatattggaaaaaaccttcctaaagttcaccgtaaaaggcctttagtctttttaaaaaatatatttatttttaagta

SEQ ID NO: 1225 - DNA, 219 bp, Homo sapiens
  misc_feature (1)...(219): n = A,T,C or G
agactgagtattatttgtgtntggtggggagcgtgcctttggtgacnnagagggcttnaagacgcctccntctgaaggaacaggctgtgcaatgcttcacatggattctggaagagcatcaagcactcttaaccactgagccatctctccgacccctgaattttcatgtactagctttctggcattgtgcttgttcattaaaaaaaaaggtctattatt

SEQ ID NO: 1226 - DNA, 364 bp, Homo sapiens
gactgagttctacagattgaacctagggccttagcaatgctaggcaaacactgggctacagctctagcacaagacttccggatccaaacattcttcagctgtgatgcaaaccttttgcctgtgcaacattcatctgaactgacttgcatcgcccccacgggactgaggataaggagagcccgatgtgaacataaaacttgttgctctacacctacgctgcgaccctttaattcagtccctcatggtgtggcaacccgaaccagaacattcttttcattgctacttcatagctgtaattttgctactgttacgatttataatgtaaatatatgtttttctgtgggtgttaagtgaaaaaaaaaaa

SEQ ID NO: 1227 - DNA, 559 bp, Homo sapiens
  misc_feature (1)...(559): n = A,T,C or G
ccggggtgaggaatcngtcatgctattgatcatcccgatgngactntgntgatgcangctggtggganaggggaaaaaatntccccgtcactgcccgtacctaaatnncntccctgacganggaccgccctccatcagacganctgcacttcctggtccgagtgcancntgtccncctgtacctccctctgcctggcggcctccaannanagcctcntgtttgtttgcnncanngcgtctgtcctctgtaggcctggacantcctgganaatttgctatgtagaccgggctgggantaagctcactttatacaaganaacattaacaggaggctggaaagatagctcagcggttcctagcacccacatggttggttcacaacagcttgtaattccagctccaggagacttaataaccccccgctctgaactgtgagggtgcacgtggcagattctcacagatacacaaacacacacaaatttcttcttaaaaaggaaacattaacagattctagaggaactggatgaaaaggaataaaaaaaggattttgttttgtttt

SEQ ID NO: 1228 - DNA, 441 bp, Homo sapiens
  misc_feature (1)...(441): n = A,T,C or G
gactgagatgctgctganagttgagatccacaggatgcctgtcccctctgctatggagtgacctgccaccatgacttctctgccgccgtgaaggagtgtatccctaagactgtgagccaaaggaaccctgcgtccttgggttgcctctcgtcagcctcccccagccttgaagcaggctgatcagaatttgaccttgctgccactgagaatgagaccacctggggtggagccttccaacttagatggctctattgttctgtctgctcttctccaaaattctgctacctgctgagaggcccttgagatattccagagacagcatccagcagatccacctacacgctggcaacaggcatcaagaatggattggcagggaatgggcctcccccctttataagcacagactcttagtaaacttgggggccttgaacagaaaaaaaa

SEQ ID NO: 1229 - DNA, 244 bp, Homo sapiens
  misc_feature (1)...(244): n = A,T,C or G
gactgaggtgttcctggagaccttggcngtcagagaggcttctttgcaagaggacctgggtccctgggtctgtgtccctgcgttccacatactggctcacaactgtctgtaactgcagttccaggagctccagcgccctcttctggcctttgtggcactgcattaacacagtgcatctatgtccaggccgaacatcatacacataaaagaataaaatagaaaatgtttgagttaaaaaaaaaaa

SEQ ID NO: 1230 - DNA, 144 bp, Homo sapiens
agactgaggagattttctcagcaacatcatttaaaaggaaattaatggcgaaaatggggcattgggaaaccatgggggaggggggagactgagagaatgagaatgaataatggcaaaataaataaataaataaataaataaaaa

SEQ ID NO: 1231 - DNA, 395 bp, Homo sapiens
  misc_feature (1)...(395): n = A,T,C or G
tgcagaggtgaagagaccccgancccanaactggtgctgcttatntaggcctangagaggagtgtcttcacacctggattggttatgcactacagcctcatttgcatgatcctcatcctgattggctactctctctctgtacctcacagagcctcattatcatacctnatttgcatgtctcacacctgattggntatagtctcaaagcctcattatcatgcccgggccaggcagngtctttgcaaaaaactttactgcatatgtacacattggttgtttgtccaaacttatgcgtggnggccagcagtagtcagtgccactctgcaacggcacatgtggcttcccacatctccccctttttgttttaataaaatgaggctggactaggcctgtgc

SEQ ID NO: 1232 - DNA, 324 bp, Homo sapiens
  misc_feature (1)...(324): n = A,T,C or G
gactgagacagctacttaatctttcccgcacacaccttgaccaacagcanccaaccaacaacccaccccatcactcgggaccctagcatttatagaccctctggaaagtcctcaaattccaaatgtcacacaattgcagaaactatctgcagttggcaaaaaacgtgcctctgctagagcacctaagcaaatcagagtcagctgctgtggacagaatgaagcagccccatatcccatacgtgggattaaacaaaaatatattcttataatatttctgtggtttttaaataaaccaaaatttcaaaattgtcactaaaaaaaaaa

SEQ ID NO: 1233 - DNA, 310 bp, Homo sapiens
  misc_feature (1)...(310): n = A,T,C or G
gactgaggaagcgcctgctgggcaaggnnggccctctccagaggagcactctactatgagcctccacctgcttctccatttgaagngangacctnccatccggagctgganaanngnctcancngttaanagcactnactgctcttggagaggacccagaccagctcccanaagccatatcggnagcncacaatcttctatgactctgntngcggggagaatctgacactgtcttctggataggaagtctttttctctgtctagcctcttcaataaagacatctgcgtgtcctcaccccaaaaaaaaaaa

SEQ ID NO: 1234 - DNA, 396 bp, Homo sapiens
  misc_feature (1)...(396): n = A,T,C or G
gtctaaacaagagaagtatcacggactggcaccgtgaancaccagtgaactgantaaggggcatacngnacccaccaaagcagagcctgnnctncaggttncccancgcccncctcagtccctaccttggcataccctgcccccaacagggaactttccagcccaggtgcttgtccgccctcccccaagagtctcctcccaatataanccagacatttagtctctgcccttctctctcttcctctccttctcttctttctcctncaatgctcccttttgctcccctacccccacccccatggcaatcccatggcctcaatccctggggtcagtgaacctgcccgcctgagagtagcatcccaataaacctgtcttcaggtactccaaaaaaaaaaa

SEQ ID NO: 1235 - DNA, 202 bp, Homo sapiens
  misc_feature (1)...(202): n = A,T,C or G
gccacagtagggcgtcagaatcccttggtgttgcanatagtngtgagctgccctgagatgagaactggnaactgaactgcagtcttccggaaagcatcaagagctgctcgcagtgcccagtgtgcagcaccctcccccacccccaataattaaatataaaaataaatcttaaaggcctgagccaccctgcccagaaaaagaa

SEQ ID NO: 1236 - DNA, 346 bp, Homo sapiens
gactgaggtgtccaaaagaatgagacacaaagtagtctgagtggtttgcacaaggtcaaacagttggtggacacccgcttctggacctgctcgcctaagtggagctctggagtttatattcttaaacctcacgtgctgcacacatgaatgaacctgacctgagagccttactagcctacgtggagggagactgtgtatccactacagggcaggggatgtagctcaacttgcagagtgcctgcctagcatgcacaaagcccgacgtgacatcttcagcatggagcagactggatggggcgcatgtctgtaatcccagcacttgggaggtggggaggtgattgggtca

SEQ ID NO: 1237 - DNA, 285 bp, Homo sapiens
  misc_feature (1)...(285): n = A,T,C or G
ttcatgtgtaatcttgaactagnccgnacttcctttatnactaccagtaatttnngagccggagcnaacaccnctttttggaatccctggatgatgaataaaaagagccaggctatttctgggacattaatggggtagggaggatagttaagacttttagtggggaaatcaacatatttagggtaagtaatatccatttacaaatacacaaacatgaagaaacagataggaatcaaactctctctctatctatctatctatctatctatctatctatctatctat

SEQ ID NO: 1238 - DNA, 484 bp, Homo sapiens
  misc_feature (1)...(484): n = A,T,C or G
gactgagggctgtacccgaggtgatggatgtatgcgaggcagtcagaagacaatgtgtgcgagtcaactctacttctcaccatgtgggtctcagggatggaacttgggttggtggcaagtgcttccattcactgagccatcttgccagcccatcatctattacatttaaatttaatttacaaaagactatacaggtaaagtggtcccagnataaaggagacacttgaacanaaaaatcactcataacanacaccgcccacacactgatggttgttgtactgaattgtantatnctctttttgtgacatctctttgacttaaanacctgtganggggagngattncacnncaaaatatntaaccctatnggncctnnaggacccatgggggtggtggnngananngcnnccagntgcaangganantgnatnngacaaagccncanntctnggtgcctaaaacaagagctatttgttttcttttt

SEQ ID NO: 1239 - DNA, 525 bp, Homo sapiens
  misc_feature (1)...(525): n = A,T,C or G
tgctgtcctgggtgatagccgacnactgntnacctctgtccccaaccaagccntnangaccaccatgcagaaactcagggtanctcttcaggaaaaagtctatatctgtcccagaagatctccacctcagaggacagacaccatccaggatcagtgatgtggccagcanactgctcctgtggtggtctacaccacgccagctccaggtggtcctgaagaatccacaaacccaatgttagcatttantctaagctccgccccacagttacctggcaacagccaggtgtgccagactctctataaaaggggctgcttgcttcctctgctctctcttgctcttgccttcttacttncgctctgctctgtcctctcattncttcccctcccnacctgcctgcatgtgttnatggctggcatctacttctctactctctccctcttcctctctttcccccctctctttctctctgactttctctgcctctacttaccctcttaactccccttcccatgccctgaataaac

SEQ ID NO: 1240 - DNA, 304 bp, Homo sapiens
  misc_feature (1)...(304): n = A,T,C or G
gactgaggagcctctggtggtgcagtcacaagccnacgggttncaccagtgaccccangcctgctcacatgaggtgacgcgntcctccccatgnncagcagtagagcggactgaatgctgggtgacaggctggcctcagactccggtgctcaaggatattcttgcttcaggttcccaaatagcactgcacactgcacacagtgaatccccatgcctgatggtggatttctgagttcgaggccagcctggtctacaaagngagttccaggacagccggggctacacagagaaaccctatcttgaa

SEQ ID NO: 1241 - DNA, 363 bp, Homo sapiens
  misc_feature (1)...(363): n = A,T,C or G
gactgaggtctcactttgtagctctggcncttctggactcagcctgnagagcagnctggtcttgnactcncagagattcatntgcttcagccgtctcctcccnccaggactgggatnanaggcatataccaccangcctgatctgaagaaaacctanttattaaatttataatagcatgttggtatcctcatacattgaatactaatcanactattctttgaatacaacgtggnagagagttcacngtataaaatgangagcatgtatcttnnatattataaatcccatgctaattggncacaaagatttgnanangtncaaacctactctgggttantaanaaggatctatcctccctatct

SEQ ID NO: 1242 - DNA, 275 bp, Homo sapiens
  misc_feature (1)...(275): n = A,T,C or G
gtgagcttcaacgatctgantgcactcaggccaatggnttcactgtggccactcctccaatgcccaacaggtggtgccaccatgtgaaaattagtcctggtggtcctagagagatgacttagagattaaaaagcatacacagntgttccagancactggagttcagtactcagcatccatattgagtggctnctaactcccccgactncaggggtatncagtaccttaccagtgcccctctgtacactacacacacacacacattcatacaaaca

SEQ ID NO: 1243 - DNA, 525 bp, Homo sapiens
  misc_feature (1)...(525): n = A,T,C or G
tagtcatgtggcagctcaggctnganctagactggacagccannanannccangnatncgcatctctgnctattgancattcacaagaggtccnttcttggcttctggaatggggcngaagatnntggntngcccagcctttggacccatggctgcctctgacatcaccataggcctntgatgagtccagngacatgttctaccaacagatacaatttttcaaaagctggagttttatcctggggccccttgactcctttggtctccttaagttctcttctccttcttctcctttttcttctctttttcctctttctcctcctcctcctcctcctctgcagctttccagtctgtcctgacatgtacacacccattctgcagtccacctatagatggtcccattagcatagagacaatatgagggagggatttgttctgacttcttttaatcatgtctacctttttgttttattctccattctctctttttctttttaaaatcaattttaattatttttattaatt

SEQ ID NO: 1244 - DNA, 181 bp, Homo sapiens
gactgagaggaagtgaacactcagtcccatagtcaagctttatggcagaggactctggtaaggatggagacaacgtctgtaagaaaactactgcagatgaagggttggccaatggtggcttgctggacaaacctggcctgctttctgtttttgtcaataaagttttattagaaaaaaaaaa

SEQ ID NO: 1245 - DNA, 232 bp, Homo sapiens
  misc_feature (1)...(232): n = A,T,C or G
tcccttggactggagntcagacaattttaagctaccatatgggtgctgagaagagaattgaatcttggtcctntggaagagcagncagtgttcttaactgctgagccatctctccagcccctttatatcacttcctaaagatgatttgattggctcttgggtttaccctggggtggagcatggtggctgattagtattaataaatatattttcttcttcgtaaaaaaaaaaa

SEQ ID NO: 1246 - DNA, 230 bp, Homo sapiens
  misc_feature (1)...(230): n = A,T,C or G
tcacctttggagacacctaatatgactgagagcatcagtgtactcttccttccattgctcacaaatgtnggctgntgcttgcacaccaagaaccatccttaacattgtaggaggcactgggacatcacttgattaaggagtgnangccnccganngaanggancganggganggattgaatgaccggaatggactgnatcctccacgggtttnttggattgcactttccg

SEQ ID NO: 1247 - DNA, 118 bp, Homo sapiens
  misc_feature (1)...(118): n = A,T,C or G
tgatgattgacccggctctgaaaaaggggcaccataaactgtaccngctacgatgggcagcatttcagcctggccgtgagtagccggcgcgccttnccgccacccccaaaaaaaaaaa

SEQ ID NO: 1248 - DNA, 493 bp, Homo sapiens
  misc_feature (1)...(493): n = A,T,C or G
gactgaggtcccctctgctgatagcgattagcccgtgagtgaaggacacactcctcgtgaggaacagctgatttcttcccaaggaaggccatcaactctctgtcgtcgttcccaagcttcccacgcacgcagcccggctgctgtcggaggccatcttgctttgcatcagcgtgggcctacggttaatcgtggtgacgacataccagattcattctcccagagagcttcctctccttcctgagaagagcaaggtcctggagagatggccttagcagttaaaagcacatcctgctcttgtaagttgatctgagtttggttcccagccatcatattaaaaagcncacagctgactgcaactttcaatcctanggaaaccaacgtcctttttttggacttncaagggcaccctgtactaatgtgcattgtacccgnaaacattgcacacncatacatataacagaaaataaaaatcctttttgttgttgttcaaaat

SEQ ID NO: 1249 - DNA, 430 bp, Homo sapiens
  misc_feature (1)...(430): n = A,T,C or G
gaacttgagcacagtctntttcagtgtgcctgtcangcntcctgngangcaccaggantggtggggcacacttttaccccngcactctggagganaagactgagcgatctaggtagtgccaccgctgctgattcctgtttgttatcctgactctagcggaactggactgctgtgcatttgtgaagtgtttgcaagtgggtagagctgccgctgctaacctgtgaactgaactgctgatttccagacatcacagacaggagttgcttnaaagaacctttctgaacaggtccacttccctcatatcctttgttttccactatcaccggtgggtgatgggctacaaggagggttaaagtgattaagaaccatcattaaaaataggtgtttgaaaaaattaaaattacaactagcctgtgtaacacaaaaaaaa

SEQ ID NO: 1250 - DNA, 317 bp, Homo sapiens
  misc_feature (1)...(317): n = A,T,C or G
gactgagcctcggatacatttgaccancanctggttatgaanaataaacctgctntnngtnanantgnggctgaggatgaaggcacaggataaaacagggctggagagatggnctggctgaccaagaggacccattcccagaactcacntggcagcatgacaccgcatttctaacntacangcctangggatcttcaggngatnctaatctacaanaagtgtgctgancacgttgaccttggacttcnnagctatgaagttgngaaaaatggatttcacagngcagnggtggcncataactttgatcccagcacttg

SEQ ID NO: 1251 - DNA, 515 bp, Homo sapiens
  misc_feature (1)...(515): n = A,T,C or G
tgagccatctctgagnnccctccgangctttctactgaaactctgcttgaganacctggtctagggaagcaaatgaaatcaggccgcacctccctgaagcctgtcttcctgggagttctctcttccctcttgcagctgtgagcaagcctagaccacagacaacccttgaagacaacttcagtcagtgccaggcagatcacatggtatggatctggccacctncactgacaacgccggatccggatggccttcgttctttagaatccaggactctttctcactagcttctttactctggtgtggctgtgcctgctactggtctcccatgtcacggcctgatcgcagctgctcatgatcatgaagatctctcctagtaaagttcatctgaaggacaattttgtgtaaacttctgtcctttccaacacttgaaatgaagagtccaccgncacatgggttaggacaagagtcagagataacctctgagatcaccacactgagctcctgaatgtagcata

SEQ ID NO: 1252 - DNA, 543 bp, Homo sapiens
  misc_feature (1)...(543): n = A,T,C or G
gcacatctgttggagcctacttcttcaggattacagtttatacagaagaccagctgaaacacccagactgcagactcacgcccactggaagcctacctcttcaggattgcagtttatacagagggccagctgaaacacctagcctcgtggaactagactcttggacttcccatttacagntgtccattgttgggactagcggctcattcagcaccatggagagtgccaccatcagccctcagcccccacagtctgactccctggaggcctttccccagaagagcatggagcctgcagacatngctgtcctagttctgtacttcctctttgttctggctgntggattatggtccacagtgaggaccaaacgagacacagngaaaggctacttcctggctggaggggacatggngtggcangccagngggtgcanncttgtnngccagcantggttggaagtggacaccttnattggnctngntgggnctgntgctgntgggggcatttctgncnctgcctatgaacttaatggcttgctttttg

SEQ ID NO: 1253 - DNA, 304 bp, Homo sapiens
gactgagggccttggctcctctggcacaggagttataggggttgtgagcaccatgtggatgctgggaatggaaccccagtcatctgcaagaacacctaggctggcctgaaactcactatgaagccagagatgaccttgaacttctgatcctctcacctccatccctgagtgctgggactgctgaagctggataagaaattaagaaagaacttaagaggcatttggtggtgacagctgatgaagcactataaggacagaatgacaatgtgtcatttattttaaaaattttttaaattacaaagaa

SEQ ID NO: 1254 - DNA, 295 bp, Homo sapiens
  misc_feature (1)...(295): n = A,T,C or G
tgtctgtggctatgggatncacattgctntcantcgaaaccnnggangttnccaaagtctggggcatgggactcagcaaagattcccagctgggattccacaggagccggaaggatnaaagggcctggtgagatggctcagtggtttaagagccgccaacctgcctcttccaanggttcctgagttcaaatcccagcaaccacatggcgggctcacaaccatcccgaaatgaaatcctgatgccctcttctggngtgtctgaagacaggtacagngtncttataataaataaata

SEQ ID NO: 1255 - DNA, 279 bp, Homo sapiens
  misc_feature (1)...(279): n = A,T,C or G
agactgaggggctcactatgcngctctggacagtntacaactnatcgaattaacagaccgacctgccttggctttccaaatgctgaagttaaggaggtctnatgatgntcagacgaggcttgaacangatacttaatcaagccgggcggtggtggcacacacctttaatcccagcagttgggagacagaggcaggcggatttctgagttcgaggccagcctggtctacagagtgagttccagcacagcaagggcaaatcctgactcggaaaaaaaaaaa

SEQ ID NO: 1256 - DNA, 267 bp, Homo sapiens
  misc_feature (1)...(267): n = A,T,C or G
cacagtggtcccagcccatggacctgnantctanagacactanncatgtnngganngcntgnngacnttnntgacaaaanancacatcanctcgcccancaacancaacancaacaacaacnacaacaacaacaacancaacaaccaaccccaaacatgataggaaacagcctaataaaaacatncctttatagccagtacaaaggcatgtgtaaaattaatttaaactctnctattgaagaataaaaattactagcctcttggtga

SEQ ID NO: 1257 - DNA, 219 bp, Homo sapiens
  misc_feature (1)...(219): n = A,T,C or G
catctttggcgagctccaaccccatgtcngtatggatgntgatgngcttncaccnngatgatacacggactngaagtctcntgaanctgcacattcanacccaannaantgntaatgtttatatgancatnaggtaanccattctgtaaaccacaaatacacagagagatatttgctgcatgatataagttaatattagnaacttcgatttgaataata

SEQ ID NO: 1258 - DNA, 271 bp, Homo sapiens
ccaggtctgcatgtggttcccaggcatatatgtggacaaatcgtctatgcacataaaataaaggaagcctgctgaacatgaccctggaagcaagccagtgcctggaagtcagtcttccagttgcagcctttggatgaagacatagaactctcagctctgcctgcgccctgcctgcctggatactgccatgctcccaccttgatgataatggactaaacctctgagcttgtaagccagtcccaattaaatgttgttttgtaagaaaaaaaaa

SEQ ID NO: 1259 - DNA, 171 bp, Homo sapiens
  misc_feature (1)...(171): n = A,T,C or G
agactgatatgtcactaagtagccctggnaggctagtctggaaacttgatgtgtggactaggctgacctccatccaattcacagaaagccacctgctcctgcctcccaagtaccgggataaacatgtatgctatatgcccaggtcatgtaatgtattgttattgttgtttg

SEQ ID NO: 1260 - DNA, 155 bp, Homo sapiens
  misc_feature (1)...(155): n = A,T,C or G
gcgaaagccagtatgaccttnaacncctgttnctntgcttncatgccccgaggactgngattgcattgggtaccancctgccctgtggtgctggtcattgaatctaaggctnnangggtactaggcattccctccacgactgagaaaaaaaagaa

SEQ ID NO: 1261 - DNA, 299 bp, Homo sapiens
  misc_feature (1)...(299): n = A,T,C or G
gactgagattctccatggtgaacaacacagcaggtcatcctctaaagagccaagtctaatctcctgcagaaggcctctctgngctcccagncagtttccaccaagccatgctgcctgccaggtcaagatgtgatcattctgctgctgcttcatcaccatgcctgttgcctganccatgatgntgatgngtgcatccaactggaaccatgatcccaacttcaaacacaccctttcttctgnangngnnactttctnatnnggnttttcttacagccatanaaagtaactaacataaccat

SEQ ID NO: 1262 - DNA, 307 bp, Homo sapiens
  misc_feature (1)...(307): n = A,T,C or G
actgaggctctcggcagtggtggacgcacaccttgatcccagcacttgggaggctgaggcaggtggatttctgagttggaggccagcctggtctacaaacagactgcaagctgtactgccctaatcanaccccagggctgcaaactgagatgcctcaagacttcgctaagctacaagaagcagttctgcaccggtggggtggccagccagcctctgtagcacccctcctggattcgtatcccagctctacctggccctcagggcttgatttctaattagagaatgcagatacagttgaaaaaaaaaa

SEQ ID NO: 1263 - DNA, 516 bp, Homo sapiens
  misc_feature (1)...(516): n = A,T,C or G
gctgggatgaacccagggccctgcagcatgctctgcaggctcatgctgctgactgaacctgctgctggaacctgctgctgggaaactcatttttaaagcaaacaaatgtcactgatgctcagcaagngccaagaatattcagctgggaacctgtgctggctaactttatgtcaagatgacacaagttcaagtcatcatcagcgccggaggaagcctcagctgatgagtccatgaaggaattttctcaattagtgaatgatggggaaaagcccagtccattgtgggtggtgccatccctgagctggtgagcaagcaagccgttgggaacaaggcagtaggcagcatcttccatggcatctgcatcaggttcctgccttgactttcctcagngatgaaagtgatggnggaagtgtaagccagatagaccctttcctctcccggntgctntgctcatagagtttcatcgaagcaatggttaccctaagacagactctaccgntggtaagatgcctgttg

SEQ ID NO: 1264 - DNA, 267 bp, Homo sapiens
  misc_feature (1)...(267): n = A,T,C or G
ttcaccctgcgccacttcatcgtgtacccacccagagtcggccgtgcactgcatcctgaaggaggaagagaatggaggcccgaggaggaagaggaggaggaggaggaccctccccncggcaccgcctggagcccatggacaccatctttgngaagaatgtgaaggatggtggccccgcccacagggccggngctttncacaggagaccngnctggtgaagnntgaatggngagagcatctctgggnaggcgctatttcaacgctata

SEQ ID NO: 1265 - DNA, 255 bp, Homo sapiens
  misc_feature (1)...(255): n = A,T,C or G
gagactgaggtgtctgagcggccggagaggcattagaatgccttggagctgaagttaaaaggcttttgtaaatcaccaaatatgggtgctgggattcaaactcagtcctcaggattgagcaggaaacactcttacccacggagtcatctctccagtccctcagaaaagcttctacaaggtgagcgtcatttctgagntataagtattnttgnaaataccgntttccaggcagaataaactaaagaaaatatctca

SEQ ID NO: 1266 - DNA, 315 bp, Homo sapiens
  misc_feature (1)...(315): n = A,T,C or G
aactgaggtgctccttgcttgtcaggagcttctccttccgctccaccgcntctcncgttgcacagacaatgtcnacantccnnttcatttangcaagcgcagaaaggacncccccctgttttccccnttcagccntgttttgtttctcgggccccctttctttccgcctgcaatttttccaacctgttcagccnttcttcagacaatttttgaaacctaaatataagangangaaggaggaggaggaggaggannaggaggagaaggngaaggagaaggagaaggagaaggagaaggagaaggaggaggaagacg

SEQ ID NO: 1267 - DNA, 277 bp, Homo sapiens
  misc_feature (1)...(277): n = A,T,C or G
gactgaggaccacagggccnggtggccctgntgctgagaactcaccaacggtacaaaatggaacgaggacttgggaacaaccagatgacaacctgaaaactccagactagactgtttttgttgttaaaatactaacaacagccagtcctggcgacacacnttttaaccccggaactaggaggcagaggcgggtagatctctgtagttgaaccaatttaaacttatccctgtctagcttacaaatgaataaaactcagactatggttaaaaaaaaaaa

SEQ ID NO: 1268 - DNA, 394 bp, Homo sapiens
  misc_feature (1)...(394): n = A,T,C or G
actgaggtgccccgtgctccagccagccttgcctcctcactntcctgggcattcctccgaganctcctgcctctcaacctttgctagtgctattctctgtgcctgggacgatacctttgactcatcttcgacctgacctantggagagagcttgggcctttggaggcagagagaccctgggttcggatttctggcttcacagcttattatttggacaagtcctttggaaaagtanntaacnnntctggagccccagcttcctaaccctgtaaaaatggagntgntaacaccctaccnntgccagggttgttgtaaggattaacctgaaattatatatgtatctaatgcaattaacatatagtcaataaatgacacgtcgctgtaaaaaaaaaaa

SEQ ID NO: 1269 - DNA, 401 bp, Homo sapiens
  misc_feature (1)...(401): n = A,T,C or G
gactgaggtcagatgtaagctctcagctacttttgcaatgttctgccagcctgcctagtgctatgtctccaccaacgatggtcaagaactcaccctctgaaaaggatgctacattggatcaagatgtagaacactcaggctccttctccancaccgngtctgngctggatgcatgccatgctttcccaccatgatgatacaggactgaacctctgnacctgtnnaccacccctaattaaatgntgtcctttatganagctanattggatcacgatgtgnnaacactcngctccttctccagcaccgagtntgtctggatgcctgccatgcttcccaccatgatgatacaggactgaacctctgaacctgtaaaccacccctaattaaatgttgtcctttat

SEQ ID NO: 1270 - DNA, 290 bp, Homo sapiens
  misc_feature (1)...(290): n = A,T,C or G
aactgagccttttattgtgtgctatgtagactacagtggccctgagctcacagagcgccacctgtccctgctttctgggtgccctanagcgctgnntgactgaanancanttanctaccntacagcaccatgcctgcctacatcctgccaggaatgcnaactggaccaagacctgngagactgtangccagngcccagcctaaatgcttccttttataanagttgntgagntcacagngtcctattcngnacagttncacagtgactcgnacacatactatcaacagata

SEQ ID NO: 1271 - DNA, 215 bp, Homo sapiens
  misc_feature (1)...(215): n = A,T,C or G
gcccaccatggaagccctggctgtcttggagctcacagagcatccgccaactctgccgacccctacttaactctggttnaaggngtgcaccaccatgccnggctctccacagagaatttttattcttagcatgnnaggctcttccttntgggtcattttattcattttactacncagcagagcttttactaaaagactttttcccccatttaaaa

SEQ ID NO: 1272 - DNA, 381 bp, Homo sapiens
  misc_feature (1)...(381): n = A,T,C or G
gactgaggtttttcttcccgtgaagnggcaaggaggactactgaagctcttataaagaaaagcatttaatttgggctggcttacaattcagagctttaatccattattgncatggtaggaaacatggcagcacacaagcagacatggtgctggagataaatagccaaaagttctttctacatcttcgtctgcaggcagcaggaagtttgagagacagtgggtctggcttgagcatttgcaacctcaaagaccccaccccacccctgtgacacacttccttcaacaagccacacctaatagccattcccaggtgactaagcatttaaatctctgagccacagtataacttcaataaattccttgaaatttgaaaaaaaaaaa

SEQ ID NO: 1273 - DNA, 240 bp, Homo sapiens
agactgagactgcaaaggaggggcgaaacgaagacatggtgaaggtggcatgaacctgtggtccagctacccatgctgattgggcccaggagttcgagaggtcctgagcaattcctagcaacaacatggtggctcacaaccatctgtaatgggatcccgatgccctcttctggtgtgtctgaagacagcgtacagtgtacctcctataaatgaaataaataaataaatctctgaaaaaaa

SEQ ID NO: 1274 - DNA, 507 bp, Homo sapiens
gactgaggccgaccagcagctcccgagacggtacaactgagatggcagctcgaggtgaaagagaggaactagacagacggaagaaagaacggagccaagtcaaagtggactctgatcaaagctcaattttactattccaacactgcagttatgaaggaggggaagggggggccgattcccgccaaataatcctggagtccagtagcagggtgaccacgtgtatggctccagaacagcaaagcagcaggttccagcagtgggcgtggcagaacgattgaggggcaagctccatccagatgtaaacagtggaaccattaaggctgggggagggaaggctacaggttcagataccataaatgcatagaggccataaattctgatccagtagtgctggagtaaacagacagttgtgaatcacccaacatgggtgctggggatttaactcaaatgacctggaagagcaaactcttaactgctgagagctctctccagggccaataagaatta

SEQ ID NO: 1275 - DNA, 554 bp, Homo sapiens
gactgagatttaaaaagaaggaggaggaggaggaggagaacaacaacaacaaaaacaacaacaacaacaacaacaactatcttatgttcaagtgcttaaggtggctggatcttccatcccgacttcctctgcaactcatttctcatgcatttcacattaaagtattcacaggagacctggtcagagataggaaacggaggtagcatttacagtcagttcgaggtgtggctgctacatatccctgctgggtgtaggactgaccccccaggaacgctcttctgactcagcaacagactccgagattccgagatctcagcagcacctgtgccgaagcacacgcacgcaggaatgtgtctgcacagaggaggaacacgtgttgacatacatggaaccaggagctaatctatggaaactcttcccaccaccctgtgtacaaagtcataagcgggagacgccatgtttcatccatactatttaaaacagaaattctctcctatagggattgtgctcagcaaagaaacatctacaattacgtcaaataaattgagccgcga

SEQ ID NO: 1276 - DNA, 178 bp, Homo sapiens
  misc_feature (1)...(178): n = A,T,C or G
gactgaggtaccaggcatgcatgtggtcccaggcatacttgccagcgcgagcatgcacatgcgcaccccccaccacacagagagagagagagagagagagagaggaanatccaggtatccagggtangnnatattgncntgtgtnntgggctggagagatggctcattggataagagc

SEQ ID NO: 1277 - DNA, 443 bp, Homo sapiens
  misc_feature (1)...(443): n = A,T,C or G
gactgaggattcttggagggagaanatgagtcatcagaacaaaggactctgangccttagagacaacagcagcacaagtcttccacagaggaagagnctgnatcaccaangagcatagcncnggattggacctaggccccctgcatatatatatgcagatgagccacgttgancttcatgcagatctcccaaacatcttggngctggnncgtgccccttgagtttgctgcctgcttgnggatgcttgcgcccttaaatnggnntgtnttgtttggcctgggtgngnaataagattnncctactccttnctgcaggactttgaagggnggggggngnggnggtggnaaaagnnnaatttnnagatagggggcttcccnnttcttntttaagnagggagnntggaggaaaggancntnnctaagggggntattggggaggggagc

SEQ ID NO: 1278 - DNA, 433 bp, Homo sapiens
  misc_feature (1)...(433): n = A,T,C or G
gaactgagatttatttattttatgtacatgagtacacatgtagctgtcttcagactcaccannaagagggcatcagatcccattacagatggttgagctaccatgtggntgctgggaattgaactcaagacctcnttgaagaccaagtcaagtgctcttgaccaccaagccatctntccaggncaaagatcacatctctttgtccttcccttacagttgcaccagcctgggaatcaagaatgcaaatccataagcctatggttccagtcttattcaaaccatcatagtaaccggcacctgttctgacaatcatgctaaggaatggaaagtgagtgtgtgngtcagaatggcagggaagcatcttaacagcaaactaagccagagtanttccatgtggaagangctttattggaagggagagacaaagtagtgg

SEQ ID NO: 1279 - DNA, 166 bp, Homo sapiens
  misc_feature (1)...(166): n = A,T,C or G
ttgccttaccagaaagacnccatgtttcaacctcccagnccttacatggctagcttacaacatgtnactccagtttcaggngctctgatacccttacacagacatgcatgcaagcaaaacaccagcgcgcatgaaataaaagtaaatacctttttaaaaaaaaaaa

SEQ ID NO: 1280 - DNA, 546 bp, Homo sapiens
  misc_feature (1)...(546): n = A,T,C or G
gactgaggtgctggtcctcgggtccgaagtgcctcatgatactggatcgattggcgaaaagctaagtaaggtgnnttccgatactatctnntanttgangacccaatacttcagcngtngtggnncnaggcctttaaccccngcactcagtgaggccnatnagtgccacantagaggcaaggggacagcctggtctacagagcacgatncnggacngcctgagaagaaaatgaaaaaagntattggaagtntganaantacacctngnagacttganacccacntatttacaacaccagaaatggaaactggaaagagccctggaggcgggagcgcctctctttcatggcaccaagctgncaagtttactcatacacgtgtcttctttttgannaaacgtnttnncttaaaaaatgccnatacttttattttggtgttagntncngannggangacctggctttnngnnttaaacccntaaaggccacntaantnntntgccatnttnggncataaaaacagtcttttaccagttaggcgggaaaa

SEQ ID NO: 1281 - DNA, 185 bp, Homo sapiens
  misc_feature (1)...(185): n = A,T,C or G
aactgagaggtgcacccctgtgatcctggcgtctggctgatgaaggcaagaggagcagaagcttaaagtttcttgactgtatagcaagttcagagccngccagggctatatatatatatnnntatacacangncacatgtntatatatgangatataaagnnatgaagagatatataaaaaaaaa

SEQ ID NO: 1282 - DNA, 554 bp, Homo sapiens
  misc_feature (1)...(554): n = A,T,C or G
gactgagattggcttgggcaaaagatccagatccctaggatttcagaaggccagcagtctccactggagaagaagatcctgagttttggtggtgtgcatacaacagcagcaagacacttgataactcagaaatgccatgaggagagcaaagcacctctgcaaggagcaagcgtaattctctggactactggcttgcaaaagcagagtcgtattataataagagaatggtggagagaatgaaaaaagacacaggtgatgaaacaaagacaaaagtgcaagaggaaccaccatcaccatcaccaccaccaccaccaccaccacgcanagagagacagaaacagcattactgggtgcctgagagagagaagaagcacatagaaaggcacattcatagaacaagccatgccagagaatttacagacaaaccctggagacagccacgactcttcagtgaaacaacactacccaaaattgtgctagaggaggaaagcatcccacangcacagaaaagaaggcnggcacacgagagagaactgctccaaattaaagatcac

SEQ ID NO: 1283 - DNA, 144 bp, Homo sapiens
  misc_feature (1)...(144): n = A,T,C or G
aacaatccagagagaantagaaagccaggcctttctcataagntagcagcaccgnttncattngggagacctgtcgtactgcctgggtccctactaatgcctgngtcaagcttatctgtggcagtaacaagactgggaagagta

SEQ ID NO: 1284 - DNA, 318 bp, Homo sapiens
  misc_feature (1)...(318): n = A,T,C or G
taggggcaagacaggcgntcaaanattgggacgctcctagcttcanaaccagtgctggaattacagcaacaaagccccgggagcgctcctccagcctctcacagaaccagccatctcctagacccttacacaactacctacttgtccttctcacttcacagaagagatttctggcagaagactataaacaacgaagaaaaagagttgaaaagctgtggctgtacaccactccaaaacagagaacgccctagggcaaccagactcttgcaaaggaagcttttaaaattaaaaagtatcagaggctggcaaaaaaaaaaa

SEQ ID NO: 1285 - DNA, 300 bp, Homo sapiens
gactgagagttgccttggaagaccagcagtctcaactaacctggacccctgagatctctcagacactgagccaccaaccaggcagcaaacactagctggtccgaggcccctgacacatatacagaggggactacctagtctggccacagtgggagaagactgtgcctaaccctcaggagactgaggccccagggattgggaaagcctggcagggaggagagacatcctccttggagagtggggaggaggaatgggatgagggcagactgggaggagggtaacgactggattgtaaaaaaa

SEQ ID NO: 1286 - DNA, 370 bp, Homo sapiens
caggccagagtatcagaactgttcacagcgagcaatggtgagcgtcatgcctggccttgctgttcctggtctgaaagcactccatggcttcagcaatgctcactttcaccttcccggagattgcagtcttgccagagagccatccaggcactcaggaggtacagaggtttgcacagtagttcaagctgggctccagtacaggctcctcctgtctcagcctcgcaagtactaggactccaggcctcctgaatttgctgtgttccagatcctttaaaaagtaagttcaaatcccagcaaccacatggtggctcacaaccacccgtaaggagatctgatggcctctagctacagtgtacttacatataattaa

SEQ ID NO: 1287 - DNA, 136 bp, Homo sapiens
  misc_feature (1)...(136): n = A,T,C or G
aggactgggtttacccatgttgcagctcacanntgtccataaccccagtgtcaggaaaaccgatatcctcttctggacaccaggtatgtntgtagtgcacaggtntacacctcgggcaaaacacctcataaaatta

SEQ ID NO: 1288 - DNA, 391 bp, Homo sapiens
gactgaggttctggcaaatcagtggtcctccactgacagagatctgcctacctctgccagctgagtcctgggattaaagccagacattgctatgcccagcttggcccttatatcttaaaaagaatcatggaaaaatgtaaaaatccagggacagcgagcaatatacgtattttacacacctgagaaacactgagacgtaccctggagatacaaacttatggcagagcccgagttggcccccattgttgaatccctatggttgactgctgcagtgttctgttgggcagggttgatttttccttataatgtttgaatatctttagaatcccaagcaaaaggtgttccatggaaaactggggaagcaagtggatccagagcaaacaaaaataaa

SEQ ID NO: 1289 - DNA, 314 bp, Homo sapiens
actgagtcttgtaactcagaggcagctggatgtctatgaatttgaagccagcctggtctatgtagagtgttcctcacagtgtctctttgacagagggaagaagaagaggagctattaaagtagcttacaggctatggtccaactagtccaacaatggctgtccacaactggaaggtccaagaatccagtagttgttaagtccatgaggttgcaggtctcagctgttcttcagcatacgctggaatcccaaagaagtaggcactaataccagtaaagagtgaatttaccagcagtagcaaccaaggaaaaaaaaa

SEQ ID NO: 1290 - DNA, 443 bp, Homo sapiens
  misc_feature (1)...(443): n = A,T,C or G
gactgaggatacaagtaaaagttcaagggccatgagtaaaggtcaaaagccagacatttcccagctgatttacatctcactggctgagaggcaagaatcctagcacagctgatcaaactgcttgcgaaggatctcatgaacaatatgaaccacgctttacagcactgggaccaaaggtgtgcgccaccacacctagcacagagcttccttttaaaattattttcacattcacnaaaaatnattggggggnatgcgtgcccatgtgaaggnggatgtcaccggtcaatgcaaagngtctctctcgattattctgtaccgacttttagaagacttatgtgtggggctggagagatggctcagtggttaagagcacggactgctcttccagagttcagntcccagcaaccacacgatggttcacaaccatctgtaatgggatctga

SEQ ID NO: 1291 - DNA, 333 bp, Homo sapiens
  misc_feature (1)...(333): n = A,T,C or G
cacgttccacttcctggggnganccagnntcaacagggaanctancacgtgtggaaagcaagcacgcanngactccaaggagatnctaccctnccaagggcatttttaggagccaggcgtcttcacttctgtgctcattcagccnttcancangnnnccnccancaacaacnatcaataaaaactggagntttggtnacagggaattctctgngtanccctggnttttctgaaacccactctgtagaccagggtggtctcaaactcaggggtctgcctgcttctgcctcccaagggctaggattaaaggcatgcaccaccctaaaaaaaaaaa

SEQ ID NO: 1292 - DNA, 436 bp, Homo sapiens
  misc_feature (1)...(436): n = A,T,C or G
ccacaccaggacctattatagcatgctgntnggctgttagccancatgtggctantggganttgaactcaggaccctctggaagagcagtagtcagtgctnttaaccacggngccatctctncagcccctggcaacttttcaaaagatggaattctgntatttcagttggatgngntggcgcctgtcttgactgtagctccngcatgttgggaggtggagccagaggatcantttacattttaccttggtttctgagagcnggcctcnncancatgggaanccactnccaangaggtgtggggagagggctcnnngtggaaaatgtntggcttgcaaggaccaggnccaatggnctatgcctataangncctggnctggngttcttnngnccgnctgntggtttangctggttgaacaatcatttttcttaaacac

SEQ ID NO: 1293 - DNA, 461 bp, Homo sapiens
  misc_feature (1)...(461): n = A,T,C or G
gactgaggagtagggatnttactgagaaccataactggaataccaggtatttctgntcgaagcattctttcatagaaatggcttcancaagaagatctggagaanggtagcatcaataancatgcttatgtgaaagggggaagaaaacctcatgggaacccacccctagacanagaaatattgaccactaatgactactgagctactaacaaacttgcaaccaatcactatgaatgactgccaaccatcaacctcatctttgaaggccccttgcattgagaaactctctgaagagttcccagaattccatacatnacacaatcacaggaaccatctgcagcntggaaaaaccatgcctcttctagagcatcagtcaaagcttgtccaaagcagccccacatccctatacctgggattgagttgaaaacacatccttatatttctatggcttttaaaataaa

SEQ ID NO: 1294 - DNA, 416 bp, Homo sapiens
  misc_feature (1)...(416): n = A,T,C or G
agacggcaatctgcaagcncacacgtcnaaccacctaatgtatgcancgacanatgggggcacacagccctgcacacctattcatgtgtgcccagcgtttccanganacacaaagggacacgtgcagagatgccccaccatgatcaagcccatgtnacccaggctacnttnaagtntgctatggaattganagagacctggagcttccggtcctttctacctccccaggtgctggnatggcagaagtgtgtccgcctgcgcattagtcatggttaggaataaaacccagggcttcaagcatgcttggcagatgttntgccaactganacacagccccagtccccaaaccacatagttttgaaatacaggtcacatttaaaaataaatcaacctgggatggacggtaaaaaaaaaaa

SEQ ID NO: 1295 - DNA, 168 bp, Homo sapiens
gactgaggtgcatcacctttgaccttgccctttgacctttggccttggctcttgtgagacctgcaaaggtgcactaggatccagccttgcatggctggcagccagatcctggggcaacccatctggtctcttgaataaaggtcaaagctggattctcaaaaaaaaaaa

SEQ ID NO: 1296 - DNA, 222 bp, Homo sapiens
  misc_feature (1)...(222): n = A,T,C or G
gactgaggggcggagtaagactgattcgtncaaaaactaccaacagaaagaccatagaccacaggagagctgngcctgcacttaccangccccgaatatgcatcaccatgatgaagagtttgttgtttttgtaggagatagacatgcttnacctncccaccgaccttcccaaccggccgggcccacngtcccatctgcagaaataaaggaaacagaagtcta

SEQ ID NO: 1297 - DNA, 126 bp, Homo sapiens
  misc_feature (1)...(126): n = A,T,C or G
agacttgaggatgtgccgctgctgctctctgcacactactgaactgngaccgangntatatccaggaaacgcttgtnagtggatcgagctaccactgctgcctcctatgaactgaactgatgattt

SEQ ID NO: 1298 - DNA, 364 bp, Homo sapiens
  misc_feature (1)...(364): n = A,T,C or G
gactgaggctgtggcttagagaatgagatgcaaactggntcagagactgaagacttatgggagcttacttggcttgagttcaccagtggcactgcctctcattttctttgaccttgtctcactgacaagacaggcataaggcctccaaagagaaggtcagggctggagagatggctcagacgttaagagcacctgattcttttccagaggtcctggattccattcccagcactcacatggcaagctcacaactgtctataactccagttctaggggttctaataccctaacacagacatgcgagcagtaaaaaacaccaacgtaataaaataaaagtaaattattagatatttaaaaaaaaaaa

SEQ ID NO: 1299 - DNA, 319 bp, Homo sapiens
  misc_feature (1)...(319): n = A,T,C or G
gaactgaggatgcatgaaattcccagnatcccaacgcttggtaaggcaggaggctggnggcgagtttgaggcaagtctgaccancacagaaagaccctgnttgaaagagacaatcaacancaacgaanccaaaaactnanaccaagcaaacatctggactggggatgtagcctcagttagtanaatgcttgtctaatatgcatgagaccctccctaggttggattctcagcaaattcctgaccagcctgggatacatgagaccctgtcaaacaaacaaacaaacaaacaaacgaacaaacggaacctaaataaaaaaaa

SEQ ID NO: 1300 - DNA, 554 bp, Homo sapiens
gactgagagctgctctcagaactgctgctgctgctgctgctggacgagctggagtccgagtccgaggaggaggaggaggaagaggaggaagaggaagacgaacaggccgaggaagaggaggaggaggaggagctagagaggctttcatctgagtcacctgtcttctgaagaggatgaggcggatgtctcactctctgatgaagactcactggccgaactgtcactgctagagatcaactctaagtagtgaaagttcttctttgtcttctttgagacaaggtctcacgtagcctaggctaggcctgaagatgctgctgaacgcttgacccctccgcttcccttacacagcgtcacggatggatctcagaaccttgtgcatgctaggcaagcactctgcaaactgagctacatctcagcccgacttctaccctgtgcttgtacctcaaaggtttcccaaatgagtctctgctccctgatgaggagagtaggctcgatcctgccacagacagagccagcacgggcttcactctaaccaatcaccacagtccctgtac

SEQ ID NO: 1301 - DNA, 265 bp, Homo sapiens
  misc_feature (1)...(265): n = A,T,C or G
catatgtacattggtgttngccagtgtgtccgtgaaggtgtcagatcccctggaactggagttacagagagctgtgaactgccacgtgtgtgctaggagttggacccaggtcctcccgaagatcagtcatctctctcccttacctacttcagcttctttcttgccactgtggcctgccactttctgccatgaccccaccatgatggactcagaccctctggaaccataaaacaaagtaaaccctcttctcttttaaaaaaaaaaa

SEQ ID NO: 1302 - DNA, 255 bp, Homo sapiens
  misc_feature (1)...(255): n = A,T,C or G
gactgagagtgcccctttgagagagggacatgagcattcttttgtgatgctaagacattactcaccggncaagcagaagggacnncacacatgggagacccaggagccaccccttctatacctctcacttgcttaagattgggcctaaagcagtggttcttagccgtcctaatgctgggacattttaatacagttcctaatgctgtggtgacccctcaaccataaaattatctgttgctaccttaaaaaaaaaaa

SEQ ID NO: 1303 - DNA, 145 bp, Homo sapiens
gactgagatccagatgtagaactctaagctccttctccagcatcatctctgcctacatgctgccctgcttctcaccatgactataatagactaaacctctgcactgtaagccagccccaattaaatattttcctttataaaaaaa

SEQ ID NO: 1304 - DNA, 483 bp, Homo sapiens
  misc_feature (1)...(483): n = A,T,C or G
gactgagaaagaagaagaagaagaagnaaagnaagaagaaggagaaggagaagatgaagaagaagaagaagaagaagaagaagaagaaaagctttcaaaaagtttccaggctggtntgnactgcacaaagaccctgacttgaaacaccaaaaccaagcacaaccagcaacccaaccaagcaacaaatgacacacaccaaggctcatctggctcctgaggttcaaagtgagttttgatagtgttttattctaacatgtattttcagagttttctgctttgaaaatgaagttcttttttagctggagaagaataaataatatttccaagagaagccatcccaggaaaaatgaaaatcacttagcttcttgcatttagtaagcagctttgtgtttggcacgttttatttgacaaaccctggtgctttctgccgtacttaccacgtgcatctataataaatatagatatgatataataaataaaaaa

SEQ ID NO: 1305 - DNA, 431 bp, Homo sapiens
  misc_feature (1)...(431): n = A,T,C or G
gactgaggctggaagttgttatctgtgctgagcgcgtacttccaccttcttgcggctgttctctgataagctccaattctgagaaaaggtttccgaggccaccggaagtacggagtatggatgcactgttatgcaaaacacattntttcagccccaccccaccaccacccctgcagcctctaccctcaggaaaagtgagtacnggaaccacctgactcancccactccagttctgnggaaaccttcacatggagtttacacctgccagctctatgacctcaaagnccatctcatgcctgggaggnttattgcgactgttntaatttttctttctgnttaattntttaaaaagactttatggtgggctgganagatggctcaccngttnaaagacagaanaagaggtgatatatgaggggaggcaggaccta

SEQ ID NO: 1306 - DNA, 486 bp, Homo sapiens
  misc_feature (1)...(486): n = A,T,C or G
tgggagccttctgtctctgcctnccagagctgggatgncatgcctgcgtccagtgcatacnacatgatnancnncatnnncncgnntnatnannatcatcatcntcttctcnancancagcagcaagcagcagccttttccatgnatggntgtttgtctgaatgtgngnctgtgtaccacatgggtgcatggngtccttaaatctcctgggactgaagttacagactgttgtgaactggcacgagggtgttagacttgaactcaggnccacactggaagagcagccactgctcttagccactgagccatntctccaaccgggttcagcctttgaaaagagtctctttggntgctctgaggtagacagagatgaangcaagaatgccatcgnggcattgatggngggggaggtatagatggcttggagcagcatggtanccagaaagggactggactggtatgtnccangaaagtaagctgaccatt

SEQ ID NO: 1307 - DNA, 266 bp, Homo sapiens
  misc_feature (1)...(266): n = A,T,C or G
gactgaggtaggatctcactgtgtagccctggctggaacttactatatgtcggccaggctggtcttgatatcacagagatcagatctgcctgactctgctgccaccctccacccgccaagtgctgggattaaaggcattcaccantgnnggcactggcnannntcnnncnancttntattcatcgtgtgngcntacctacctacactactctanggtacactacactccctacactattcgncangggagaacagtggttttctct

SEQ ID NO: 1308 - DNA, 228 bp, Homo sapiens
  misc_feature (1)...(228): n = A,T,C or G
gactgagatgaagaaggggggcctggttgcacacgcctgccatcctagcacgtgggagatggtggcaggaggatcggagttgaaggtcatcttcaggtncntagtgagtntcaaactcagaacacagcctcaaatcaaacatctgaccctnctgtctgtatgtctccctggcttatgaagaacctgaggactttgtgtgagttgcacaaacactcttctaactcaaaa

SEQ ID NO: 1309 - DNA, 466 bp, Homo sapiens
  misc_feature (1)...(466): n = A,T,C or G
gaactgagggggaacnaggtgcnngccaccgtgccggtgtggaaggcagcggacanttttgggagtgtcaattntcttcntccntcacgtggagcctgggtttgctgagtactcttacctgctgagctatctcatcagcccctggagtgactcctatcagatatcngagtnngtgnctgagaantcanatctggncccacggagaccaggaggnanagagtnaaaatncntgaatcngaagacacnagnnctnaggagctgcagnatatgggaactannagttcaaacncaacctcntctggaagagccnagggcggtcttnactactgagtnannaatcnagngcagggccccatgggaaagggacactaaacttgctctgctgcctacctgcgaccccagctncaagnggagacagntgagacatgaagactgctgggncttaaaatttttaagtaaatacatt

SEQ ID NO: 1310 - DNA, 191 bp, Homo sapiens
  misc_feature (1)...(191): n = A,T,C or G
gactgaggccagagagagaccctgagcatggcatggacttttgaaacctcaaagtccatctccagtgacacatgtctccaccaaggcaactcctaatccttctgtgatggtttgtanatgctcggccgagggaatggcattttanaaggtgtggccttgttggagtaggtgtgtcactagtggatgtgggc

SEQ ID NO: 1311 - DNA, 392 bp, Homo sapiens
  misc_feature (1)...(392): n = A,T,C or G
agactgaggtccttttcctgctgtacnccagaagaatggcatcacnccgcctgtgagctgccatgcaggtntctggganttgaacctcgggacctttggaagaaccgcaagtacctcttanccacntgagccatgtctccagcccntaacctgttttctnnttgtaactnttntagtatcaaaattgtatgtgatatagcactgtgtggtagtttgacagttttcctcgtttgtgctgcataaaataatgatgcaccttataagctgacataaatgctgggctggatgcatacacaccaattttaaaaagtcaaatttgccancctggtctaccaagcaaactccantacagccagggaacatgagagacccttatctcaaacaaaacaaaa

SEQ ID NO: 1312 - DNA, 148 bp, Homo sapiens
cactgtcacccttcacgacgccgcctctacagacttctgcccaagctcgccgagattcttattctcttcagttccattttacagatgaacaagaataaaagtggaggcagcaagcggcttcgctgactccaggtctctggatgacaaa

SEQ ID NO: 1313 - DNA, 393 bp, Homo sapiens
  misc_feature (1)...(393): n = A,T,C or G
gctgaaagagggtgacggatccactggaactacacttacggnttcccttgcactgcanacctgggtgtggagagctgaatggcacccagngctgntaactactgagcctctctgtaaccccacgaacaacatttntaagantcagttcgtncacatgggaaangcaggtgctaacctgctcagcagagtgtctgggatgatgaaagacaatgctgtcagcnctgtgttaatcctcaccatactcaccttaaaagtcaaccctaagagtcacacccctcccctaccccctcctactgtcttggaactagaacagtagaccaggctggccttgaactcagatccaccttccctttagtgttagcattaaagcttgtgctaccaccaaaaaaaaaa

SEQ ID NO: 1314 - DNA, 345 bp, Homo sapiens
  misc_feature (1)...(345): n = A,T,C or G
gactgaggccttgacgaaggatccagccccttccagcccccaatgtggggtttccttggatgccagcccatcctgggttggacttgaagatggcaaaatgcccaggggagaaacccctcagatcttgctctttgctacatatccacagatctcaggaccaggtgctatntgctnncttnagatnctatattgtgaactgggggaacctccngngntactgnagcttcagcctaaaactctgcagcaggggagaagangcnncacnggccttngnntnacncnngcacancnggaaggcatcctgntagggctntntgtntgtncatttatttgtgtgtgtgtgtg

SEQ ID NO: 1315 - DNA, 295 bp, Homo sapiens
  misc_feature (1)...(295): n = A,T,C or G
atgtagagacttaacctantgcgcnctgcctnaactgaggaggangggcacacagccnacatgatcatgctgggcacantnntccacactcnccttnancatnaccagcaccatgccttgggtccagactccgatatgaggagactgcaaagcagggctggggaggtgggagcaagcaggggtggttttgttgttttgnttgttttttgctnttcgagacagggttnttttgtataaccctggctggcctggaactcactttatagacngggctggcctcgaacttagaaattcg

SEQ ID NO: 1316 - DNA, 304 bp, Homo sapiens
  misc_feature (1)...(304): n = A,T,C or G
acagactgaggtgttatttcctgggcagtctgcagtgaccccgcgctctggaaagacagaagtgcttctacaggagcctagcactacagtctccgagaggcttcacccagcancagatggaaacagatgcagagacccagggccaaacatcagatggagctcggggagtcttgtagaagagtgggggaagggatttagcaatccagaggggtcaagacaacacaagaagacccacngagccaactaacctgggcccatgagggctntcagactgaatcaccaaagagtatgggggggggggctg

SEQ ID NO: 1317 - DNA, 289 bp, Homo sapiens
  misc_feature (1)...(289): n = A,T,C or G
actgagggattgaaccttggcctcatgcatgctaggcagctctaccgttgagctggagcccggacccttcagggcaagaactatggccctcatagctgtgtaccgttaagagcttttgctgagccctcacgatccgtaatctccagaacagggtttctctgtcctggctggctggctgtcctggaacgaactccgtagaccaggctggtctcgaactcacaaagatacacctgcctctgcctcatgagtacctgggattaaaggtgngcaccaccactgccctgcttat

SEQ ID NO: 1318 - DNA, 422 bp, Homo sapiens
  misc_feature (1)...(422): n = A,T,C or G
gactgaggacctcctggnccactggcangcacctgggctcccagggtgacaaggctcgccntcnngatgcctgnacgtgnggngagtccgtggtcangngnncntgcttgcaggccccatnanttgcttctncaaactgcnttggcctccatgcatggatgaantgcatggcncagagctacatcaggagagccanggaaggggacaggaanacattttattccagcctccagactgaacagagcagcatctagcagttcatctgcacacacagcttcagttactgtggtcagatatttcaactgcatcttaggaaacactgttaaacttgttctattttattgcaaggtatcctttttaaatgttcttgctgggcctaanntataaaattaaagtttgacataggtacacacaaaaaaaaa

SEQ ID NO: 1319 - DNA, 428 bp, Homo sapiens
  misc_feature (1)...(428): n = A,T,C or G
gacgggtgttggagccgctcangacatgccaaggtcanccggttgaggactcaagtggaaaaggcnaagataataanctggcttcaagcccacccagcagccaaggatgagcccgaacttctcagcctcctgcctgcacanntgcgatgataacaacatgtatgtggtgcntgtggatcgaacccacggcacggtgcgtgctagnaagaaaatggantnatccgatgcncnatcctgaagcctgcttgntcgggganggactnttctggggcntcctactgccacncgnantgntnagaccttggngagacnnacntggntgcctttacannagaacaggcgagtantcgcngtaaaatcgtgattcnctcggccctctccttgataactggtgtcacaacaataaaatttgagccttgatcaggaaa

SEQ ID NO: 1320 - DNA, 266 bp, Homo sapiens
gactgaggatcctagtgtgcagttgctggtagagaaaatggagtgataggattgctcagtggttaagagtacttggctcttccagaagactggatggaggctggttcccagcacccacattgggcagctcacaacctcttctaatgatggctccagggaagtcgaagaccacctttggacctttgcagacactggcatatatgtatttacatacagatacctgtagcgtataattaataaaaaacaaccccacactaaaaaaaaaa

SEQ ID NO: 1321 - DNA, 212 bp, Homo sapiens
gactgagtaccggggcattgaatttaaagcttcacaaacattaggcaagtgttctacaactgagctacatccttgaacaaaactaattactttgatatgttctatatggggaagtgtcagtgtagtccactatagtactcaaatgtaaataatgattgtttaacaaccaacctctaagtgtataagtgtataaacagaattataaaatactg

SEQ ID NO: 1322 - DNA, 539 bp, Homo sapiens
gactgagggtttctctgtatagtcctggctgtgaggagcgggtgtggcagcagccccaagatggcgcctgggactgaagctaagtcttatgacttgcacctgacttcctcatacacctgaaaatagccatgaccattgtgagagctgcacaggtgcaccatgatgctggcagtgtaaacaagtccatatttggtggagacatgcccctgccgccctgattggctgaagctgcgtgcctggttagggccccagggactgccccacgctgcctcaggtctgcaggcttggcagcaagtctccatgaactatttgctggcctaccacacaggattttgactctcttaaacaccatccacctctctcaggacaacctccatcattccctgatctggaagacaaaatgagagacagacacccatcctcctcagaagcccgggctggagggcaggcagagcttgggcatctccctgatgtagaacacccatgggctgccctggaacatatcacctcatcttgggcctcgagaaattctgatccag

SEQ ID NO: 1323 - DNA, 404 bp, Homo sapiens
  misc_feature (1)...(404): n = A,T,C or G
gactgagcctgtccatcacagaaggaagtcttggcaggaacctggatgccggagctgatgcagaggccatggaggggtactgctcttagcttgctcctcatggcttcctcaggccgttttctcataaaaccgaggaccaacagcccatcaatcatcagttaagaaaatgctctataggcttgcccactggccaatctagttgggaaattttctcaactaaggttccctcttccaaaatgactataacttgtgccaaattgacacaaaactagccagcacaccaattaaatatgtctactttaaaacatacagnccaaanatatagatgttctgtcagatttctcttagaatgcataaaagaaaaatttggatgtccaagaacctcttgaattagaaataataat

SEQ ID NO: 1324 - DNA, 220 bp, Homo sapiens
  misc_feature (1)...(220): n = A,T,C or G
cttctgcatttgccaacagcggatgcgcngacaatgtanctgcttcacctctgggcntacttgtcctctcagcntgatgatgtgccgacaatgtancagctcactctgggctactgtcctctcagctgatgatgcgcgacaatgtagcagctcactctgggctactgtccttccagctgatgtcctgctcactctcattttggattaaaactgattctga

SEQ ID NO: 1325 - DNA, 156 bp, Homo sapiens
ggagactgagctctgtctccctttctctgcattctgcttgtggatcagatgtgagctctcatctactgctctggtgtcacacctgcctgcctgcctgccaccatgctgcctgccatgatgatcatggactcaccctctgaaactgaattcacctgt

SEQ ID NO: 1326 - DNA, 132 bp, Homo sapiens
gactgagagcccttggtgctaccacttctgagcatctgggtgtctctgcagtgttggggtactactagtgtgtctgaagacagctacagtgtactcatatcaaatatataaatatttaggggaaaaaaaaaa

SEQ ID NO: 1327 - DNA, 534 bp, Homo sapiens
  misc_feature (1)...(534): n = A,T,C or G
ctgagcctttgcaaagncggcnttgacaagttctgcntggtngccntgcctgagaaaaccatngacntgcnaanaccatcagncnccaaagngcacgtgcnnnggtgctgtgtaccgagacaccatngccattcattactccttcnctccagatanctnctntgntttgancatattacctggattgtccaaagatcnnctacntgctaggtntgatnacanagagannaatcnnnctatacgcttggngnctgaaagnnctaatccaaaacgggaactcgttggnaatntntatngtcttgcatgtggtgagatgtaaagggctagagnggttggcccagtcgttaagggcagcntgctgttgctgaggacctgggtttggttctcggcgcccccatgatggnaacagcttgtaactctacttccanaggacccaaaatcatcttntagcatnntggcagnancaggcatgcacatggtgcncatgcatgcangcanaaacactcatacgcataaaacataaataaaaatgaa

SEQ ID NO: 1328 - DNA, 226 bp, Homo sapiens
  misc_feature (1)...(226): n = A,T,C or G
cgcagactgagggtaataaaatgaggacgaatgcatgaacaaggcttatgaaaaatangacagaggtggctcagcggttaagagcactgactgctctgccagaggtcccagagttcattcccagcaaccacatggtggcgtcatgaccatctataaaggaatctggcgccctcttctggccttcaggtgtatgtacagacagcactcctacttttaaaaaaaaaaa

SEQ ID NO: 1329 - DNA, 221 bp, Homo sapiens
  misc_feature (1)...(221): n = A,T,C or G
aggcgaatactggccnttgggngactggagtaaggataggnnnnccataancagttttgctagtggnatgctntccttangnccctgtgagcctaacaccagcctctgncttgtctctttctggatgagaattaagacttggggtanagagctggngagacttgctcagcnggntgaaagcacatgactgctntttcagaggtcttgagtgtcaattgcca

SEQ ID NO: 1330 - DNA, 275 bp, Homo sapiens
  misc_feature (1)...(275): n = A,T,C or G
attaagattcccagctacctacctggnaaactcataacggcccacgccatgggacattgnacacncncttncgangaacgtncacatatagtatacctacacatacaggtncaaaaatctatacctagtanaaatagaattacaaaaaaaccatttattgaacacaggagtggtgctcctccctgtaatcccaaagaatcatgaaggctgaagcaggaggattgatatcacnagaanagccngggctacaaatgagacctgcctcaaaaagaaca

SEQ ID NO: 1331 - DNA, 366 bp, Homo sapiens
  misc_feature (1)...(366): n = A,T,C or G
gactgagggatgactctccggactccgttantctggaagcnctcaataaacataagcagtatcttgaagatnaatatntgaaacttagacangacntgtcatctgatgtatgtaccagcccaaaagaaagctgaactagatgaggaaatggttgtgttactaaaccggagagatatagcctgaaaatctgaaaaaagaccggcagtttcgccatcaaagactgcaggttatttcacacacacttactccatggatgaagcagaacatgagaatctcatttcaagatgtcatggagagaattcggaaaaccaaagctatctacggctatgacaacattgttgatgagatatttgaagatgacccaaa

SEQ ID NO: 1332 - DNA, 109 bp, Homo sapiens
  misc_feature (1)...(109): n = A,T,C or G
tgggatagggtgccttctgtctcctggatactgggattgcatcatactcggcttttgtagnactaaggactctaaccaaggacctcattcatgcaaggaaaaaaaacat

SEQ ID NO: 1333 - DNA, 413 bp, Homo sapiens
  misc_feature (1)...(413): n = A,T,C or G
cagaccttctgtaatgtatagnaagactgncctcctgggaagcntctacctaacanctgacntgaaagagatgcnganacccacggccaaacagtgaatggagtttggggactcttatggaagggttggggnaacaattgagggctccgaatgggatangaactttacgaaccaataaccaaanaacatactcattgaacctaggcctccccacacatatgtagcanatgtgcagctcagtgttcttgtgggttccccagaaattggagtggggggctgtctntaaagctgntgtctatttgtggaatacatccccctaactgagctgccttgtatggcttcagngggaaaggttacacctagncctgcagagacttgatgtgccagggttgggggatacccaagggagtcct

SEQ ID NO: 1334 - DNA, 482 bp, Homo sapiens
  misc_feature (1)...(482): n = A,T,C or G
ggcctgtcctcttgagacggcccctancagcagcttgantgagacnagacggcagcgacagctcaacccttgganctgtggtcggggacccctctggaagngttaggaganggcttgaaagcacctgaacaggatggcaaccctntagggatatatatggcaacagtatcaactaacctggatccctgggagcctcccagagactaacccaccaaccaaagagcatacatgggctggtccaagggccccaacacatatatatcggaggactgcctggtctggcctcaattggagaagatgtacctaatcatgtagagacttgaggccccagggaaggggggtgcctggggctgagggaggcaccttctcagaggcaaagaggatggggaatgggatgaagaacagtgggagggggactgggaaggggggcaatatctggaatgtaaataaataaaatgatttttaaaatgacaaaaaaaaaa

SEQ ID NO: 1335 - DNA, 547 bp, Homo sapiens
  misc_feature (1)...(547): n = A,T,C or G
cgctcttctcttccaangntttccagaatgcctttccaggctagaacccaggctgtgatctgctggccggacacaccagtgatcgatttcagaaggaactgagaggcctccnncagtcctgcctgagtccttggangtggcaacgacgcctgcctggagtntcantgaganncntccttttgatgagttantcctctaccannttcntgacaaantacagatcatgcaacantgatgcaagntgatgccaatacacgagtgtcgtcagcgaagactatcgaggcagagcaagccaaaccaatgtcagagcatcctcccactgtctggggtcatagttacattctttctaaacaccaccgtcctatcacgtgtctgcttcagcaaaagctccactcacttgtgtctgtttcagccaaacctcctttcacttgtctgccccagcaaaacatacgacaataccgagtttccatagaaaccagaaatttctatttnaggaagaaagggctttactaactgaggtacactgncaacttggaacaattagatt

SEQ ID NO: 1336 - DNA, 576 bp, Homo sapiens
  misc_feature (1)...(576): n = A,T,C or G
gatattactgaaggtcnatgtanctgctggcnttctggcacangtgctgganacncgatngtangcccatgggncacngagagcctcancaagtacacatggctgtcacttcagnctgntcctctgaaatatgctcagattgntgccgagaggctatctatagtcnggcnaaatccatctgatntgngcagtgatgaacatcttgcgtacttgancaancactgtggagagaatggaaaacagttgttataaaggctttgaacatcacttgtgaagaataanaaggantggtccacttaccaacctgtctcttaagaggataggangcccaaggngatgagtagaagttctgatgaggcgtggctgctttccacacagacacnngaaatagcttctacccatgcctntgtgcgaagaacanatgtangaccacctgcccaaggatggcanctnccacaatggactgggacctcccatagtaatcatcacntcaagaaaatgtcctaaagacttacttacagaatnttanaacatnctncccctggcaacaaccantctgttgacctgggaacctat

SEQ ID NO: 1337 - DNA, 575 bp, Homo sapiens
  misc_feature (1)...(575): n = A,T,C or G
gactgaggcacactcttgcctctcatatgcctacaccggcaacggacgtggagagaagcttgctattcccatttcacagttaaacaaatggagtctgcatgtgagaggcccccgaggtccccggctgctcagtggtaccaggtcataggtttgaaggaagaagagaagggagaaagcaacagggctcttctgatgcccccagttgtaaccaggccagcagaagtgaggataacctgaggagatgcttgtgaacctccatttagctgtgagaccactgaaacancggaacccaaggcattggatttgccccangaatctcacnctgngaagggaaaggctaaagcctggagccagacagaggggagcttgtctcccagagaccccccagagttctgagaacttgtcagatcaccttgcaggagagactgaagctgagacagtgatggatcagtgatggacaggaccacaccctgaccaggactcttagctctgcactcctcctgccctctgtttaagcctgagccttgtatccagaccttgaaaacagacttgggagtcactatacctctttttca

SEQ ID NO: 1338 - DNA, 571 bp, Homo sapiens
  misc_feature (1)...(571): n = A,T,C or G
gactgaggcgcctcattgtgagcatgccttctgcaacgcntgcntnacccactggttntctcagcancanangtgnncnggaaaccagtagctgntgtcnctatatgcccacgctgncgcaccaggaccatngnancatncgggaccactgttgataaanctacnnattgcntgtgacanntcctgctgntnggttgcaggagctgntggcagncttgacatgctcatgtgccaccttagagactgtgagcncaacccgaagcggcctgtgacctntgaanagggctgtgnnctggagatgccncaaagatgaactgccaaaccncagttgcnttaagcaccctgcgctccgtggtncancaagcagcagtcgcncatttgcagagctggagaaagaccttcggcttgaacacaaagcaccaggctggcagagcaagaagcgagacattcagcctggctgaagggcggtatatgccgagccattcgnnagtgtcaaccccaacctttaagaacctgggaggagacaattcgaatacaacgagatccttcgagnngggtgaacttccttgca

SEQ ID NO: 1339 - DNA, 562 bp, Homo sapiens
  misc_feature (1)...(562): n = A,T,C or G
gactgaggttttctctgtgtaggcctggctatcctggacttcctttgtatactagactggcctccagctcagacttgtgtgcttctgtttcccaagtgctggggttaaagaacattaaccaggtcgtatntgtcggcaatttcctgagagtcaacaccgattgctatgcgggcttctggcgtatgcagcctggattacctggtccaaggggcagcgtgaaagcactgttttccngagcacgaggngatattttggagccgttggagcactcctcgagctgttgaagataccctgacttaccgagaggacttcctgaaacctgccacagagacatctgtggatttttttgtttngttttgttaaagagactcaaggttttatgaatcgtgtactactcaaatcagagcaagaaacaaatgtatttttctaagacatcaagataaattcttaaaattttgtctaaggacaccccatnccacccccgtctaggcagtatgaggatttgctgtttatagggtattctcagggcagcgttattaacccctgaggtgctttggaatcc

SEQ ID NO: 1340 - DNA, 560 bp, Homo sapiens
  misc_feature (1)...(560): n = A,T,C or G
actgagggaggcttctcaccatactgannaaanccaggcaaagngcttgctacccgcacgccctgagctgnaaacctcncacttccaancctctnaggaacctaccgatgngtttgccatggatgttcangctgaccttntcacctgcctnaggaaacccacagaggaanncgggtgtgatggagcacgcctttantcccagcactggngnggcanaggcacgcngatttntgagttcgaggccagcctgntctacagagcttctaacaggacttcctgctagcctgccgcagaatnatcatcagttcacgtgccatgagcccgcagctccgcaaaactctgagatcaccgttaagaacccaaactgcattcagtgggattcnagagctgacagtggctttgtgcttgcacggcaaaccatagactggntggttataagaggcccggcggngggcatggcangggatggngcaggttacctngtgncacnactcnctgatatanggccatcttcantcncaaatgatgagtttagagatatctctaaacttgaaattctt

SEQ ID NO: 1341 - DNA, 560 bp, Homo sapiens
  misc_feature (1)...(560): n = A,T,C or G
actgaggtgtacctggagtgggaagtgtctactgtgacttgttcatgtcaagccagatcctgatgttagaaagagatcccagaatgctaacaagttgggaattcttgggtttccaacttgatgtgaaacaagctctcctctgaaactgtgttcaacactgtagagctggcgcaccaaaatctggtggtcttgagtcacaaatctcctgggctttggaaggcattgatgacccagcancatgcnttaggagtggtggcatggtgggggctcaggagcccagggcttctggcctttggagcctgcctgttgagggtgctaattctcctactgctgccccgcctactgctgccccgcctactgctgccccgcctactgttgacccctcagctcttcaattttggttctnaatcgacttcagacctgctntgntgttttggcagactgatctctcaaagaatgaanagaanaancccntccctctgtttgtccctgaagcttattgtttgcaagctaatcccccncgcgtgttttccctcagatgnaaccctcacaccaaacgg

SEQ ID NO: 1342 - DNA, 560 bp, Homo sapiens
  misc_feature (1)...(560): n = A,T,C or G
gactgaggtacctaccatgccagcagtgcgctgataatttatgcaagcgaaacgcctatatgcataatatgtccctcgattgagaagtcctgcctccgagtcttgatccggggaattttctactctgagtgactggtggtcaagacagaaaagggactgctgccagcttctgtggagcttagctctgcttccctgaaattctacgacatggggaagtggggtctcctttgggtccccagcctcagagagtcggctttgtacctggactggctatgctgcctctcctgggaggattcgccaggaccatgcacgctgcagtctgtgccctttctctaggccgcattctggacacaagagctcctcacaagcaccaaagagtcaagtctgttttcaggacttacatggccttctcttggcgttgccgctcttgagtatgggctatgcctcaaggaaggcccaaatggggtcactgggtgttagtgtttgntgtttattgctggttttggtgacagaatggagaatagatatgctagtttccttttttttcccttgacctttaa

SEQ ID NO: 1343 - DNA, 560 bp, Homo sapiens
  misc_feature (1)...(560): n = A,T,C or G
tgaggtaccagctctgttctgtggtaagncctgcccactgtgaaagccgttgccacaataaggaaggatatgaagatgtatgaagaagaaaggataaagcaaagagatgaagggagaaactcatcatcaagagacatcagaggaaggaggaggagcaaactgggccacctctccactccggcatgacagtcaggaagttcattcagggaaagagaaccgtcaacagtgggaagcagatgggagaaaagaagcccaggctatacagaaagttctcagtttgatgtcacaaatcatcaaggaaatgcaaatgttcctatcaaccgcagtggagctcacacacctgttaggatggctgtcactttttaaaaattcctttaagacaagcttcatggagaaaatgaaaagcctctttggtgaggctgcaaaatggtggaaaaagaaaagtctagaaaaactagagctaaaactaccatggaatctgacagtccaactcttggattcaaaagcactgaaatcggaatccctcaaaggcattaatagctactccccagattacttct

SEQ ID NO: 1344 - DNA, 559 bp, Homo sapiens
  misc_feature (1)...(559): n = A,T,C or G
actgagctcctctgtgctcagcagtgcccagccgcangtacagccagcatgtgaatgangacacaactttccctcaaccaganacccagctctcttccaagtgtcaacacctacagacgtnagccatggaaacttctcgctccccttcgcctcagtttgccccacagaagctgacagataaacctcccctgcttatccatgaagacaactcagcaagaatcgagcgggtgatggacaacaacaccactgtgaagatggtgcccataaaaattgtgcactcagaaagccagcccgagaaggagagtcgtcagagtctcgcgtgcccagctgagctgcccccactgcccagtgggctggagagggaccagatcaagacactgagtacatcanagcaatgctactcccgcttntgngtgnacacacgacaggaggnggaagctcctcatagagcccgccctccagagcccnggccacccagcacgcctgcacctcctgtcagagatagctgttcctcccctccctcactcaactatgggaaggccaaggagaaaaccatggg

SEQ ID NO: 1345 - DNA, 559 bp, Homo sapiens
  misc_feature (1)...(559): n = A,T,C or G
gactgaggtcagacgggaacaccttgtnntanccaccaccgnagtaccatnttntgctcatgcttcaccgtgtactggattaccagggtgcttncctttgttgcctgaatggcttgaagctcncanagatggcatagaatcggcgtgttttgggtagtctncaggcctttcaacagaaagcatgcatgagtgagtcattaatgacacttgcactcaatgncctgtaggaacctncaactccannancngagatgctgtttgcactgagccactgtgcacaagtcacacagtgtgccacatgcacactactaacagacttgttgcttgcaagaatctctgcttcacacacctttgtgtatataatgcaagctttgccaggtcccagngggtgaggcacttacagccacgcctgaccacctgattacattcttgagtacccacataatggaaagagggagacagctcctgaagttgncttctaatttctacatgcgngngangacagatgngtgcacacatgngcacatgcacacagacacacacacacacacacaggact

SEQ ID NO: 1346 - DNA, 556 bp, Homo sapiens
  misc_feature (1)...(556): n = A,T,C or G
gactgagaccatctatatttgccaacactntangcaaaataccccngancactgaacaactgagcgcaggaggaaaacatttcatctttctctctgacagaattacagggatggaaatggagaggagcctgaggaaangacagtccagcaatangcccanagagnaatccanntcaaggggaggtcctaaggactgacactattacatgaggctatggagcactcacaaaaagggacctagcatgactgccctctgaaagacccaacaagcagcctgaaagagtcagatgcagatatttgcacccagccaatggacaaagccagggattcctgtggctgaagtaagaaaagcctggaagaagctgaggaggagggcnaccccataggaagaccagcagtctcaactgacctggatacctganatctttcagacactgaaccaccaaacaggcagcttttgccagctttatatgaggccccaacatacntacagcnanaggactgcctgatctggcctcagtganagaagaagccncctaaccctttgaaagacttg

SEQ ID NO: 1347 - DNA, 555 bp, Homo sapiens
  misc_feature (1)...(555): n = A,T,C or G
cagactgaggtcatggtagaggtacgggcacaactgcangtctgnaagaagcgtgtggaacaagagcttgatcgtgtgatcgctttctggatggagcattcccatgaccagnaacacaggggncttcttcacatgtgntncccgtgatgggaaggtatatnancacctctnntannttcntctgcagtngnagncaggcatgnannnatngcctccttatnccgcagntttgancgcttccancgagttgagccttctgaatgcagnannaccaggnggngaatttttgctgcgttatgcccggatagaaccacctgnnnnnaaatgngcntttgtgctgnctcggnatggccggccagngaaggtgcagnggaccattttcagcgagtgcttntacaccatggccatgaatgaactgcgganagtaacgggggaagtgcgttatcagcagtgaagccntacagatgatggatcagatcatccactgggtacgggaggacccggctgggttgggccggnctcagntctcangggcactggccacagagcccatgg

SEQ ID NO: 1348 - DNA, 553 bp, Homo sapiens
  misc_feature (1)...(553): n = A,T,C or G
actgagtagcaacatnctcaggacaatctccctgcaggantgcaacccaaggtcaaaacaaaccntcaccttcctgcctgagnctcggtcagagcttaatcaaacacttaggtgtgttacctgcccagctgtggaccggtccctgctggcatgccagcactgggcacctgggatctctaacagccgcccntcatcccatggctcctgagagtgcactgtgcctaacccattaagcaacatggcttatgctggacacctgctctctgcaagtctgaaactggagtgtataacagtccctttaagcagccctggctatcctggaactcagagatctggctcccttcctgactgtgactcccacatgatggcatgcagatgtgccttaccggactctaaactacaggtctgaatggagagacacagtgataagggaaagcccagcccataagtggaaagctgagagataggtaacagggagaccaggccagcctcagctcacctctcctctcaccagccctctcctagtctcttttttaaagacaaggtttctctg

SEQ ID NO: 1349 - DNA, 552 bp, Homo sapiens
  misc_feature (1)...(552): n = A,T,C or G
actgagtgtccccaaactagctgganaaagagcttctgctgtctatctgcagattatctaaaggctggagaacaagatttgtacactgcatctaaacataggaattttgacccaccctccatcaagaacaagcataaacccagatgtggtataatcccccacacaagaggctgagaggcaagaagatcctgagcttgaggtcaaccttggaaacagagagttcgaggaaatcttgggatgtgtagtgagaccctgtcttgtttcagagacgggctgcataaaactccatgttcaatccttagtgccacctaaactggatgtggagctatgatcccagcattcaagaagaaaaggtaggaagacaagaagtttaaagtcatcctcaactagatagcaaacttgagaccagcctgggatacacaagagccttcccacagaaagatgacaaggaagagattcatttcatgtgaacaaagttaaagtatttttttatttgggattattggtaggttaccatatgttgtggcacacttgttttattctttaaaaacc

SEQ ID NO: 1350 - DNA, 552 bp, Homo sapiens
  misc_feature (1)...(552): n = A,T,C or G
actgaggttgctctgagtacacaaacagtatcctgtgaagagtgcctcaggaatgtctcctgtctgtggtgcaatgagaacaaggcgtgtatggactacccagtgaggaaaatcttgccccctgcttctctctgtaaattgagttccgctcgctggggcgtatgctgggtgaacttcgaggccttgatcatcaccatgtccggtcctggggggcctctgtgctcctgggcatcactgtgtgcctgcttgctacctgcntgccngncggaagaagagccnggaagccagacaagagcgatgagcgggccatgagagagcaggaggagaggagagtgcnggcaggaggaaaggagggcggaaatgaagtcaagacatgatgaaatcaggaaaaaatacnggtctgtttaaagaacaaancnccgtatgagaagttctaaggtggctggcacanacttgtggtggatcgtgcagttccanagtttcctggngaatgcacctccccagcanagcctgcagagacctcaccaccatggnncacccttgacctgggtg

SEQ ID NO: 1351 - DNA, 551 bp, Homo sapiens
gactgaggctggcactgctgatttggtgaagatggcagtacttggctctgctaggcttacagagcaccatgggtcagaacttcagcctgagatttgactccctgtcatcaagtgaggcccacgtgatgtggctagggagggtggcatttggatccatcttcacttctgatcagaacttcagctccttcccagtaggtcaagcaggcctgggctcagaattcttctcctgtcaactctatgtcattgctgtgtgagtcctcaggcagaccctgaattttcatggtgtgtcacagtttacccagacagcagttcactcctgtcctgatggcaccagctcctcctatggactcttatgcccatggccataggacagcatcgccctcctagagacactgggtgggagaagtaagtcagaatttgtcaagccctgggacagagctggcacacaggacacacctgtgttggctcttggccctttgcctggcatccgatgggtgctcaggagtgtgacctatgtatcagctgaggattcatacaacctcctcgagctt

SEQ ID NO: 1352 - DNA, 551 bp, Homo sapiens
  misc_feature (1)...(551): n = A,T,C or G
tgacatcggattttcaaacagaactacctctgtggcantacaaccccattccttatttagggaactttntttcagnaagccntcaacctngggnaacgantgctgagccttccgagaaccccnaagggagttacctttcaactcantggcacacgagccacctggggaaacgaaactgccctaacntcantccgcagacagagtgccgtccagaaaggacaagcagantacagggaagtcaacctgccaagcntctgccaagacaggtttcagagaatttcntccnttatcatcttgtgggaagcatggcagtgtacagacagataatgcggaaagagccgagagttctacacacatcctgatcctcaagcagcaaagaagactgtgtgccacactgggtgtaggctgagttaggaggcctcagagcccacctccacactgataccctttcctncaacaaggccatacctactgcaataaggccatacctnctgttagtgctactncctatgggccaagcattcaaacacatgaatgtatgggggccattt

SEQ ID NO: 1353 - DNA, 550 bp, Homo sapiens
  misc_feature (1)...(550): n = A,T,C or G
actgaggggcaacggatcctctaaacaattctacttcccagcttcccttgaagccaggcaagaccaaggagatactgtcaaagggatgaactgggtaggactccggggagattctgcactagggagacaaagtgcatggctctttctactttgctgcttcttgctgagtccctggaatgaaaacaggttggggcctggcagccattttggaaaacgaagcgacattgaaggtgaccacatgtagagggtactactactggacatctcagggaggttctctgggnggcacaggttacccgtgttctctatttggacccttagtctcattattaaaataaatttaagaatggactcaaaaggaagcacaaaaacaactttaatagagtttaaaagaatagctcatagccaggggtggtgtcccatgctttgaattccagcactgcagaagcagaggcaggagggtatctatgagttcaaggacagcctggtctgcatagggagatccanaacagtcaggacttcgtggagacacagtgtctcaaaattttaa

SEQ ID NO: 1354 - DNA, 549 bp, Homo sapiens
gactgagagggagacagcgagaggactgacctcttactccaaccatctgctgaagatggagggaaaaccaggcgtttcaaggcctccctggacacggagatgtagatttcaggatgggaatgagcccagtgcaatagcaagaacatctaaaagacaatgcaaggagcttacagccaaagagagctcagctccaagaaaacactggccaacaaccatgaacctggaaagtgagtttcaaaaatcatgtttttctatttttacaaatcttttcatttgactgaatcatttgttagagaatggtgagacttaataccataccgaagcatagccattagagtcaagacaatcaaatagtaagatattatacagacaataaaattggatatttgtatgtgtgtatgtatattgcatttcttcaaaaattgcttacctctaatgaaaaataagtttcctttcagtattatataatattgtgattctgtgatatgaatttttttaaatctttgaaccatttatcctatttatattcatattatttgtttttatttc

SEQ ID NO: 1355 - DNA, 549 bp, Homo sapiens
gactgagacaagcctcaccaactatcctgggcaggcctcagcctcccaagcagctgagattgcatgaggtgctgctgggcccagcaggagctgattctgagtgagttggaaaaagaattccactgtagaatctccacattggcaaatgacgtcccaaaagtccagcgccaacctagccaagaggaagcttcagaggatgtagatacacaccggaggtcatttaagtgacctgctattgaaagagcaactacaagcttcgttacaacccagaaatcaggcagaatttagttcataatcaaactaactcagaaaactgtttataagctccaaatgaaccgattctctattcgtctctgccccgatctcctccaaaccaatggcaaattggaaagtgaacaagagtgatggcattaatttagaagccacctgggcagtgagggggtctactagttcataagttcaggaaccagtttttataggaactgccttgtgcctcccgtcctctcctggagttagtgtatgcacagcgtaacttatgtaatgattgta

SEQ ID NO: 1356 - DNA, 548 bp, Homo sapiens
  misc_feature (1)...(548): n = A,T,C or G
gactgaggttctgactcaaccttggctcctgagcaatgtgtagtaccttctgtccccccggnggtcctcttaacaagccccaaaccaggccatttgcagtgattccctccctgggtccttgacgacggagccttgtccaccccgctctactcgagagaagattcatgaggcanaaccaggtgcatgangccntatcggtgaangcaccacatgcacgggtngnngaaggctgagaaataaggntcangctgggnataaaagtgtctccccacttcaagccggntcccatggatgcctgtcagaanttggtatnaaggttgctggatccgncacgcttcaagatggaagtaccangaaagangcaccagcctgagtaanggtgatgcccgnatgtncctgtntnttactcatttatagatagaancaacttttcnattggactcagggngagccacatcaggngctggggccttanacaaaaccctgtgaccagggaagtcatangccccagcanggacacaaccgccacagctgtttaagtgataata

SEQ ID NO: 1357 - DNA, 547 bp, Homo sapiens
tgaggaagaagaggagctgactgctggcagtggcttcaggggaagcacaggaagggagagtccactgaggatggggctgagagccttaggaagaaagcggtctgaccgtggatgcactgctcagctggaccacatctcgtttgagtttgtgggttcccttagcctgctgaacatccatatcttctctacggaacatgtacacagggcgtgcagagagtgaagaagtgtgcccttagtggttcccgcttgatcagattccctttgctgacatgtgacctaatgacggctactggttcctactcctgcttcagaagaagttgttccaagggcacttcaagttccaggatcaggacctcatcctcgactactccctgtgtgaggtggatgaattctaatacagaggtctgactggttgtggtgactcaggttgttacacagtcacaagctcttcaaggcaccacaaggagggcattttctctctgcaaagtgttggggttgaaatgtgaaatgtcattggtaccatatttgtttgaacactttatgcgcg

SEQ ID NO: 1358 - DNA, 547 bp, Homo sapiens
  misc_feature (1)...(547): n = A,T,C or G
gactgagcccctcttccaggtttccaagnagcctttccagactagaacccagacatgtgattcgctggccggacacaacatttggcgaaccgacgcgggactgagaaacggcagaggacatttggaagaaacactactggtttggagctccgtagaagaagaaaatagttaaaggaaattcatacntggagaagggctaagctgaaacagcngtttaacctgagtgctaattcacttaggttcagcagtgaggcacgtcaggagctaggaacattaacaggcggttagccatagctctcagaagctacatttttaggtgtgggaaaagaaagggcttattaaaaggaaattaatgatcaggcggatggtcacagttaaaagactgcatcatgggggaggaaaatgtcccaaaaagcagagagaaatttcaggagtgccatgctttgttctctctgggctttacagcagaagtactctgccccttttgtgtcttgtctaatgtctggtgcaccaatctgttctcgtgttcaattcatgtatgttcggg

SEQ ID NO: 1359 - DNA, 546 bp, Homo sapiens
  misc_feature (1)...(546): n = A,T,C or G
gccgcgccgcctggagcntcctntgtttacnagagggtcagcctttcntanntgttanacatttggcntgccagttctgggcctgagtggagantatatctcatgaagagggacacntacgtggntgggcattgacatcagccctgccatgttggatgccgccttggaccgagatacagagggggaccttgctgctaggggacatgggccagggcgtccctttcagaccgggctcttttnatggctgcatcancatctntgctgngcagtggctctgcaacgccaacaanaagtcggacgtccctgccaggcgcctgtactgnttcttttcttccttgtactctgcccttgnccgtggggcccgagctgtcctgcagctgtaccctgagaactcggagcacctggagctgatcacaacccangccacaagggcangcttcactggcggcgtggtggtagacttccccaacagngccaaagcaaanaagttctacctctgtctgttttctgggccttncacctccctgccaaaggggctgactgaaa

SEQ ID NO: 1360 - DNA, 546 bp, Homo sapiens
  misc_feature (1)...(546): n = A,T,C or G
gtagacgtacagtgccctgncccaggctgaagcntnnntgctngatcatgnngcttgtcngttcatctgtctccnncngagcncnctggngntnactncngagccngacacacnnccctnttngnnctggctcccnanataatgangncngccntcngnntccttanccgttccttcatacctgttgnttgaagctctaagcacngnanccatgatccnagtcctngactatnccgggagnggggccgggatctgcctcgcagctggcagcccaggccatggctcaccgggtagagtttctggttatagcccgcagagttcacacgtgctgtcaccacaggatgtgatcttggagccccagcgtgaacaccagcacacagatggtggccagccgcataaatacacacctgcagggaagaggggagggaaaaaaaggcgtcagagctggcctccctctggacctgacactgaggaggaacacaggcaacttccttgcatgcaaacctcaacctaggtagagattctgctggggatgaaaaaggaaag

SEQ ID NO: 1361 - DNA, 544 bp, Homo sapiens
  misc_feature (1)...(544): n = A,T,C or G
actgagacagcgtggacttgatggagtccttacggcacccaggatggaagcttctgcagctcccagttgcccctgaagatcatttttctttctattctgctctccctctgtctatcagcttctcccatgtggaagggggctcccagtttctccttcctacacatttaatttcttcagcaacnttttattaacctcgctcgtctctggggacttgcagtgctcatccgtctctgcccttctcaaacccattcgacaaaattgggatggtattgaaataaatgggccctgcagccagccaccctcttcaagatggaggctcttaaatctgggctagaaatctctagcaaatgccattagttttccaggagataatactactgcttcactctgggtctgagccctgggaaggtgctgtcagaatctcccagaataccatggggtctgggtttttgagtcagagaagggatagcagaattctgagtctcatgtggcactcaaggcccagnggggctatttcaggaagcgattctacgtgtgttatctc

SEQ ID NO: 1362 - DNA, 541 bp, Homo sapiens
gactgaggttcactatctgcaacgccccatcgccctgtggtgtggcctcaaccattccttggtgctgagtcagacctcggatttcagcaaggagctgctggggtgcggctgtggggccggaggccgtcttcctggctggcccaaggggagtgcctccttcgtcaagctgcacatcaaggtccctttgtgtgcctgctccctctgctccaccagagagtgtctctatatgctgtccagccacgacatcgaacagtgccctgtctatcgagacctgccagccagcagggtgggggggagccctgaacctagccagggggctggagccccccaagaccctgggggaacagcccaggcctgtgaggagtacctcagccagatccacagttgccccacgttgcaggaccgaatggagaagatgaaggagattgtgggctggatgcccttgatggctgcccagaaagatttcttctgggaggcactggacatgttgcagagggctgctggaggggctggcccagacacctcgactcccgagagctga

SEQ ID NO: 1363 - DNA, 538 bp, Homo sapiens
  misc_feature (1)...(538): n = A,T,C or G
cagaggcacccgtagctgatcctaaccgtcaatcaaagtctccactggagaagtttatggtcangttgtgcaatcatcatcagaagcaattcatccgcgtcctgagtgacctgtacaccgagtcccagccaggttntgaggacctgcagcctntggattccaccntgatggacgtctccgcttgcnattcgggctgtgcccagctgagcggcanagagaatgaaaaggatgattgtctcgaggagagttctcctgcctctgtaaagntgttcttagactcatccggttctcctagctccctgaatgtgactgaagaaaccatgaaggaaccacctnctgagacagactctgtagatgggagagacagtgccgcgagctcgagcgctgtccagaaaggttcctctgaacctccagacgctcagcataaccccacaggttctgcagacagttccaccatgggatgcctcggtacactggacgctttctcttctaactctccccacagtgctaaaagcttanaggggcataatatatttat

SEQ ID NO: 1364 - DNA, 538 bp, Homo sapiens
  misc_feature (1)...(538): n = A,T,C or G
ccttgtgagaatcagtgangncagactgnaacaaagaagagtctnatnacntcgnaanganatntcntgnctntcatcantgntgtgatgnngnatgccatgggtttggnnttnatgtattttccncgngtnccggctggttgtcaccgctgatgactttggttattgccccgcggcngcggatgagggcatcgtagaggccttcctggcaggaacttgtgaccagcgtgtcactgctggttaacgggcacagccgcagagagtgccggccgagctggcccgcaggcacagcattcccacgggtcttcacgccaacctgtctgagggccgtccggtgggcccggcccgccacaacgcctcgtcgctcctcagccccgaaggcttctttctcggcaagatgggatttcgggaggctttagcggctggagacgttgctttgccccaggtgcggggagggaactagaagctcaactcaggccgcttccggggagttgctgggcaggtcccccacgcacgtggacggtcaccagcacgtgct

SEQ ID NO: 1365 - DNA, 536 bp, Homo sapiens
  misc_feature (1)...(536): n = A,T,C or G
gactgagatgagctactgaagcacggngcagtgccatcatctaccctgagggtacagacctgtaatcccagatactcggacaccaaaccaggaggatttcaaggtccaagctagtacagcttcaagcgttacattagaaaacagagccaggcatgttgcacacctttaatccagatactcaggaggcagagacagacagatttctttgagttcaaagttagcctgctctacagaatgagttccaagacagccaaatcaacatgtgcgcctttggttttagcaattgggagggtgaggcaggaagatggagagtattaggcaacctaggctacagagtaagacactgtctccataaagagtgagaggggaggagggaaggggagactaggaagaaaaaggacagatgggaggagaaacgganagctgancgggaggctccacggagtgccctnggncacttgaaaagtangnatacagntttaaacttttnaccagacttttccanaagagnccaatnacttgacactcgaaccatg

SEQ ID NO: 1366 - DNA, 534 bp, Homo sapiens
  misc_feature (1)...(534): n = A,T,C or G
gaactgagaggcccaaaaaagagtattggatcgcctggngtggagtcagaggaggagcngagcctccctacatgggtgctatgaaccaaacttggatccctctgcaatagcaacagtgctcttancccctcagccatctctccatccctagaactcaattactttttataagcttacagccgtgtgcccaccaccatcaccgaagggctgtggtactttgaatgggaatggccaccacaagcacatacactcaaatgcttggtcctcccagttggtggaactgtctgggaaggaattaggaggtgtggccttgttgaaggaggcatgtcactggggatgaacttttgaggttttaaaagctcataccttgcccagttaacctcccctcctatgtgcttttggattagatgtacattctcagtcccanaagcatgcctgctgctgccatgctcccaccgngaagctnatggattctgctaccctttggaaccatgagtcccanaattaaatgctttgtaagttgaaaaaaaaaaa

SEQ ID NO: 1367 - DNA, 534 bp, Homo sapiens
  misc_feature (1)...(534): n = A,T,C or G
gactgagaataaaaatgtctacagngggaaaagtagaagccatggggaagctcatatatatagaacgagctcantcaggaactccagaggatggctgcctnaacctccccaatcaggaactccagaggatggctgcctcagcttccccaatcaggaactccagccaacgtcctcaacttcaccagccagtttctgctggttgctatgctccgtggactatctgctaatgttaattaagcattcacactgagnnatgnatgngcgnngtanngccancntgaanngngccntgacccttnngctgtgctttggagggggaacatngcccagaaacanccacnacccggctgntancatcnccaaggngggcacagggtgaattctgcaacngaangctgnccntgtggngagganctggntactttaccagnattngctgagggnnngacctactcagggctctttaggccattaataccagngagcgtttnagggtaaatgtggngtctgnggccacagcgtttttaaagagat

SEQ ID NO: 1368 - DNA, 529 bp, Homo sapiens
actgagtctatgattgtccttctgatgtcctgaccaacccttccacagaggagaattatacagaaatgttactacaaggaagtagggctcgtttggacccgtcttggaagtcacccacccagagcactcagatatattttccgagaagtgatggactgctctgatgagtcgtaagcactgtgaactcggtccacctccgtctcatctaccatgagaacctcggtatctagcaatgccaaatactttataacattagtgctttcattccgggggactgtagatgaaagtattctacttttattgtatctcaactcttaatatgggtattgtaaaatgactatgaaattaagtaattttagaaccacagagaacatgtgttactaaagctctcccacagggtcacccccaagcaaaatcaaggagctaaaaaagtttcttacttctcacacccccctgcatccctcccctgctccattgccctgtgtgtgcactattcagctcaataaggagggacacttgtcatgcaggg

SEQ ID NO: 1369 - DNA, 529 bp, Homo sapiens
actgaggggacctcagcccggctgagctgatgatgctgactataggagacgttatcaagcagctggttgaagctcacgagcaggggaaagacgtcgatctaaataagatgaaaaccaagacagctgccaagtatggccttgcgtcccagccccgcctggtggatatcatcgctgcagtccctcctcactatcgaaagatcttgattcctaagctaaaggcgaagcccgtcaggactgccagtgggatcgctgttgtggctgtgatgtgcaaaccccacagatgtccacacatcagtttcacagggaatatatgtatatactgccccggaggacctgactccgattttgagtattcaacccagtcttacacgggctatgagccaacttccatgagagctatccgtgctagatatgacccttttcttcagacaagacaccggatagaacagctaaagcagcttggtcacagtgtggataaggtggagttcatcgtgatgggtggaacgttcatggcccttccagaagagta

SEQ ID NO: 1370 - DNA, 527 bp, Homo sapiens
  misc_feature (1)...(527): n = A,T,C or G
actgagaaacagacactcagaacagannaccggccggcacgcacacaagaggggatccccatacctccaagtcggttctcgggtgtgaggggtggtcgcgtttcccggccaacgcaccaaatgaaagacccacaacgtgaggactcccccacgttctgactcaggagaggcgacaccccaaaatcaccaacgagaaaactggtcttgttgcaaattgcaagaggatttttattcaagagcactctcgggcccacggtcatacaccacgcaggggtagaggactgtggcgccccgagtagctgggtaagggggtatttaaaggaagaaaccgaaactcaangaantggggagggctttgttngaagataccaaagataccagttaagagttacaaggaagtgtaaagttacnagagtcacaaggaatncctggtaattgttaactctcaagacagnttctaagagcccctaacaatagcacatttgcattgcaggttctggtaatggccagggtgactttcttttgaa

SEQ ID NO: 1371 - DNA, 526 bp, Homo sapiens
  misc_feature (1)...(526): n = A,T,C or G
gaaacttgaggtgatttgcttgcanaggtttgcgtctttangtcccccaagctttggagttcacagaaggntttggaagccaagacctggacntacatctggtgtaggtccacacctttctccatagagtgtgggggcagttgagccgaagatctacgtctggaataagcaagagtagacccatatcggacctctacttcctccacccctttccatgtgtgcaaggagttaaatggacacaagatggggaagccttcaggtggtaccaagagctaacagctggctgcctgaaggccctcacctgaagccaaaccagaacacctcagcccagagtgtcaccttctgggggctgggcacagtagctatacttccttaatcctgacactctagaagcagagcctggcagatctctgtgagttcgagggcacctacattggtctgtgtaacaagtaccaggccaggcagggctacgcagcgagaccgtgtccccccacccccaccccccgccccgtctcaaaaaaaaaaa

SEQ ID NO: 1372 - DNA, 525 bp, Homo sapiens
  misc_feature (1)...(525): n = A,T,C or G
gttcgtcatccatccctgcctcagaaganggcagcntccatcgtccaggtgcntggggcntgagngannanctccatcngtcccttcagttcnttttccntaanctggacganngnacccnngacnatcntctcagngttattgtaagcttctaccacctaaggagtccgtcggtgctacctgctgcctttcccagtccagggatgggactccaggccttatacatagggtctccaaaagactgacactggtacttagtgcatacagcccaaggnaggccctgggctcccagattctcctacctcagacctccacagtagctgggaagaaagaccagtcccacccacctactgaaatcgccaattccagctgagccaggcatcccaggaccggttccacgtctacgactctgatggtcaccaagnggctgtagaaccaccanagacaatccacttccttttctgttttttacattattatttttggaaggcaggatctcacagagctnagatttgcctctaacac

SEQ ID NO: 1373 - DNA, 523 bp, Homo sapiens
  misc_feature (1)...(523): n = A,T,C or G
ctctgggcttgttctgcnctcanggacgcncgtgtgcggcggaccaganganagcncagcaggcgccacccttgaacagatggnaaagaaacnaactgtgaangcaaccccacagntttctcatggtcaatgagtttctgaaggagatnnaggctggggctgagcatgcagcctgatttccgtgggcacagnatcggactaagaaggccttctggaaggctagggaaatggaaccccagagncttaaggaatggggcaatttcctcacctcccccctctagccanaaacagtntgtgcnattgntaaagaactnangctccgactctgcaaaagagaactaatgtctacagctgagtantagcacaagggcccnttgctggattctgcttcatttanagtcaattactctttgcttctaagaggaccgcanctttgaagtaatatgagaacatatttaatcctgccctacctgggataccgatttgtggcattttgccaaagtcccaggcagatggtttctaa

SEQ ID NO: 1374 - DNA, 522 bp, Homo sapiens
  misc_feature (1)...(522): n = A,T,C or G
gactgagcagaggactgcttggtctggcctcagtgagagaagatgcatctaaccctgaagagacttgaagccccagggagtggggatggaggtgtgggggngctnacatcctgtngaatatgtgagctggantgnttacagtctgcttgcctgnnnnattgactcacagacncttccgtgnccaatccttaanaggagngattgttttnttncagaggccctatcnnnntgntgatncagtattgacatacnacangnctgctcatccgtggactncantagagaanatgcatcgtaannaatgangagtnttgnagncccanngagngtggatggaggtganggtgcatgccatcacatgntctacaaagcaggaangagcaaaaactngctgnnggnttgtnatatgaagntggccancatgccggagtgncgactcnggaacaagangaggancntntttgttgtgactaatggtttctgaaaaaaccgtttttattccattcacagacaaaactttgg

SEQ ID NO: 1375 - DNA, 521 bp, Homo sapiens
  misc_feature (1)...(521): n = A,T,C or G
ccaaatgccgttccaggnnaggaacccaagnctgngntctgctggccggacacancaacagaaactgcnggagganggnncanacttcctttgttnagggganggaantgtntcctgacaanttacagnganaagngtacttnggaaggcgnattctanacacagacgtgactaagctgggagccttaanaccaagagaagaanggtgcataggagcctctggatcatgaanacccanaganggtntatgcatanagcctttgcatnctgctttttgtgncngtggatgngancttgcagttnncctatccatccatggntactncatgctcccctgcanatagagnctggtgaagagagccccacataaggcncaaacnaaaggtgactngtctccacgcagnancttctcatatctcttagtgcctcactaactttggaacaaaatttgaccaaaatatgacctaatagtccaaaatatttctatacatggattaaaccatctgttagtatttactaaa

SEQ ID NO: 1376 - DNA, 513 bp, Homo sapiens
  misc_feature (1)...(513): n = A,T,C or G
gactgagcggagaccagttacacctgnccgcagaaatgggcaccttgattgcagactgcctagggaacggaggacgcacgtgtactgtccgccccatcgggtgcgatgcaggttccagccgaagatttccagctccaactggcacccggaccacgaattctgtcgccaatatctacagctcctctccctccccgccacggggtgtgcagtctgactccggggccccaaggcttcctgtacccgctgatcggcagggcgggggtgggggagagccggttctgcagaggactgaaaccggcgccctgccccctcttcttcaccccagtgaaagagggctgtaaaattccggaagagagattagaggcaggggatgggtgggggcggtgaatcagtacattccttccaacccctgnntannantatagagntatcacttntngaggnntnnnancattntntatagcttnttctggagagtggttaactgnggtgganncggacatactgagcaaa

SEQ ID NO: 1377 - DNA, 511 bp, Homo sapiens
  misc_feature (1)...(511): n = A,T,C or G
atcaagtctgtcaagatgtgatttgtcaccaagcagaggctcacagtctaactcaggactcaaacaccccaagccctggaaccagacccaggaacagtggctctccttccgaaccagccaagcctctagctcactcctaagcaaagggcttgtcatgaagttatctctgctctgttctgcaaacccagaattctcttatcatcctctgccctgtccgacagcctcagcccctccagtttgtttcctttacattgcagcttcctgagacccctcagacacctcccagtcttgtcctgcagccacgtgaccctttagttacagtcccatgagacttgatttttttttccccctcatactttaaaactaaanggctgtcttaagncaacagcagagtcnaacagggngccccancnnaanccaggtttgtttgggcctgngggaaaggtgccaccctaatancaggctnaacaantcatgggnaccaagccaagtaagctggcctcccccaagg

SEQ ID NO: 1378 - DNA, 508 bp, Homo sapiens
  misc_feature (1)...(508): n = A,T,C or G
gactgaggcagcactcaatggacaagtgtacgagctgctcactgttttcatggattggatatcagactgccaccttagcaaagtggagcctgaggaacctggtgtagatgggggaaagccaccagccaagccttcccagagaagtgacattcaagagaaatgtgtaaagctgttgcctatgatgacagagcagctccagtggatgccgctagtgagcgccaaactgcacgagccgttcgtaaggtttatctattggtctctgaggcagctggatgccagcgcacgggnactgagtaattggaangngtnttaccatnnggtctntngcccatgttccacanaaaaggagatangacgtnngcatacactctgatntttttctgtntaanaacaatcttntntgttcaatactgtcctaagggtctgntaggaattgtattcntcttgnagaccaattnatgtgctcagncttttnaacataggaacgtacccatcttttcactcacaa

SEQ ID NO: 1379 - DNA, 508 bp, Homo sapiens
  misc_feature (1)...(508): n = A,T,C or G
actgagctggtgagcaccgaggctgcncttctgcagcagctggcgnagtcgatgctcaaagatgactgtgcgtccgagctgagggtccacttggccaacntcctccctctgccctncgatgtagaaccnnccacgaattgacctgattgcantggtgattnancttcacngncatatacagcttccanaaagtggctgagtttntgcagcacgnncnacngcancttcttcctggggaangtgcgctntcttgtaccacggncggacacaggaangccactgcanngtccaccacaacacagttataaaactggcccacacctaccaaatccccntgctcctctntnatttacaggnggnaagctttnatgcacccatngcacggcctctggngcgcattntgcagatgtgtgctggccatgtgccaggcgtntgcgcgctgaacctgatgtccntgctgngnngccccgagaaccncccatgcaagnagctgtgagcattactggcc

SEQ ID NO: 1380 - DNA, 505 bp, Homo sapiens
  misc_feature (1)...(505): n = A,T,C or G
atgagagccactggcctgacacaacaccatgtcggangcactcttantctcttgtgtcctgggagacaccagcttatgtgtggcagagctgctccagggagangctcacatatcaaaggactgttgtctagccaaggacccgagccaacagcaacactgccaactgcaacacttgccaactgccgatgccactggggaaacagacctttcccatgttgaactctgtaataactcaggctccaagagactgagccagaggcacccaggtatctgtcccagaaaaactggaagataactgttgaggcctgctcctttcaacataaatgtagccattttgcattcagactccatgttcctcgcaaggtgaaattaagttcacagttattactctgatactgaataatgctactaataagccaaaaagttatggttgaatcacttgtatcctgttatgtcaatgttctaaaattcccctgctcatcatctatccacctcttacctcact

SEQ ID NO: 1381 - DNA, 502 bp, Homo sapiens
  misc_feature (1)...(502): n = A,T,C or G
ctcacactgactaatncctnttgacagaaagntcaggtgtacaatagntgttcancccacaaggctggatgtctncgtgggccctcanaagtatgctggaatcttaagaagtcggctccagtgccagcnaaggaatggactttgntagcaaggtgagagcaagcaggcagaaagcagaggcttctccctncttggctactctnggttganaactngacttcatctgnaaggaactaaactgcnngactggaggcgcccctgngagggatntagnctagcgcttcttcttgntcttcttnatcanntgcggctacgtactntnctcangggnngctgaatcaaantcaattcacagcggcggaagacttgcttgctgagttttatttccgctttttggaaatggctgncattctttaccactgtctgacttgnaaccttatgtgcagatcnttttaactcnaactttcngggcanntcctggctttccctccctggactacac

SEQ ID NO: 1382 - DNA, 502 bp, Homo sapiens
  misc_feature (1)...(502): n = A,T,C or G
gacttgaggagaggatcctagatatccacagtgtggtctccaggtcactcngtanctgantcnacanctccaganagatncaagaacgggtcctcgcccaatgcanaactgngntgaggatcaacagagaacacacataactctgcaaacatccctggggatacnttgggacaggtgtcanttnncgtnacactcttggaaagganaanagcaagnatgtnannaccatctcaantccntcnctcaggaagtgcananggagtgagggtgnttcattgactgccgattttctggnggggggggatatgnatgcaaagagcaggcntanggantagtgcactatctgccaagctctgctgcaggggaaccgtggctctgagaacatctgcagggctggtccctgcactgctgnccccctggagggntnggntcatctncatcagnaggnccctctgggggccantttattcnggaccatctgggngggactggaggttctctg

SEQ ID NO: 1383 - DNA, 500 bp, Homo sapiens
  misc_feature (1)...(500): n = A,T,C or G
agactggccttgcaactccaaaaggcangcangatntctttgttcgaggccagnctggccttanagnctggntgggnncgggccngcgcnatagagaggngttagngcnggcctntggntgcccatatnatctcttcagcgacgnggccgatgtcncaggtttccgaancaccgttgctnagctggnatgaccaagagaagcgngacctnncttggagaaacttgntactaagaagaggccaactcgnncnggagggccctatgctgngtgggtgncanaggttatgctgnagcagacccannttgcnacagtgatcgactattatactcgatggatgcagaantggccaaagcttcaanacctggccagcgcttccctggaggaggtgaaccagctctggtctggcctggactactattctcgaggccgtcngntacaagaaggagctaggaaggtggtaaagganctagnaggccatatgccacttacagcagataca

SEQ ID NO: 1384 - DNA, 499 bp, Homo sapiens
  misc_feature (1)...(499): n = A,T,C or G
tgagaaggatccctcccccccccacctcccctacggcacnaacaganntcnnggtgtgnnacggcactggccagancatcctgnanactcaacaccngngactnctctgcgacntgggtccngntacaggacntttnaggactgactttcngatggatctacntccaccgcggtcntcccgaccttactactattacttgccaagtgctatnggcgagactgcntgcaccatgcagtaagactcaccgnntccatcataagcgtcaagttttaccatagcaaagcaagagcctgtgtggttntncctcccgctaatactgnacaggaaacatcnnntgtctnggactaaaggcctgnctttcctttaaaggacctattctntaatctgagttnctantaaataactgacantcttctanactnnactnncccctaattacagacactcanttcnattaattgaanaataaactncaaaatcttgaagaactagactaag

SEQ ID NO: 1385 - DNA, 498 bp, Homo sapiens
  misc_feature (1)...(498): n = A,T,C or G
gaactgagccctaggcagagtngactgntgagtcctatccccgctntaacncnagaccgacaggagnngtganacgtaangactgccccnacntgttcttggaggagagatcctcanaaggggagcgcttgtgcccccgccccaaacctcccngcaaccaaggcccccttggaggggacagantaaaganagccctcccntgcntntcttganacccaaaaagctgtcagcagtctacatccagttcaatctgagccatctagccggccacagggacatcgcccagatgtgcacctgtatcgactcgaggaagtatcagcgggatgcacacatggccgtgttcctgctccttggtcgtctagtgttgtagcacacacctgggagcaagtgcaggactgctgctctcctggggtttggtgggccagctaacacttgtctccctccctcaccccctctggggctggagggtgggggggggtcaggtgaggggggggcttt

SEQ ID NO: 1386 - DNA, 539 bp, Homo sapiens
  misc_feature (1)...(539): n = A,T,C or G
tggtgggaagaactagtctgcgncgcgtgcagcagctncgagtagggtggctgagccgctgctcactcgagtgctnccaagggagagagagggcagttctgctgcctcagtccctggacctccctccctgccacttctggacctctccactgccctgcaaccaaaataacatacgactttatgggtgggcntctagatgactacntgggaccctgctctgtcctgtgcctcaggctttgcacattagatgctaaatattccatttactattggtcatggcaagagagacctcatttacttgtttgttttaagttgatgaacgcttttcccctccgcttctttttacccctttgagataaaattttgccatgtagcccaactatgctggcctgagaccctgacaattcagtgcttttttttatacaatccgtgttgggtgtgataccatacacctgtaatcccagcacttggatatagaagcaggtatatttctgngagttggaagccagcctggtgtgtatataagtttcaggccagcc

SEQ ID NO: 1387 - DNA, 493 bp, Homo sapiens
  misc_feature (1)...(493): n = A,T,C or G
tgagctgtgtgatgagcaacatcactcacccaagncacaagtctctacntctgagagaaaggnnctgttcaggccactttcacagttgggtacagccaacaccagcaatgactgcacatctggcctgccacaaggctcctgttgtattaacagctaaggttgactgaaatcaacctgcattttgtaatcaaagccttcctctgtaagttataatttttcaaacaacaacaacaacagcagcagcaaacacacagacaaacagacagagatccaaaatgtttacatcaaacacatgttgccaatgtgattgctgcccgtgtgtggaaacattccctagatcatgtgaatgactgcacttgaggctaaagttcttggaagagttctaagaagccgacaaatggaaagcggaaaattactcaggaactgctgtttggcaactacaactgntaggctgtaaaataaaccttctttcaattcaacccaaaaaaaaaaa

SEQ ID NO: 1388 - DNA, 493 bp, Homo sapiens
  misc_feature (1)...(493): n = A,T,C or G
aaccaaggaaggcgtggctcctgcctgactgcctatgggaattgctgggaacttccgnntgcaggcgccggcttgcanctcactcaggccgnantccctttngtagctggtcactctcatgcttcctccaccggcagcacacatgctggaagancatggtcatgngactgaagatgangaccggtgagggcanaaccggcctctcgtggaaagtcatgatgagctgcnacctntgaaatttccatacttggttggatatnatacttgacctcaaaaaatgnnntgctgaancanaccggacagtcacatgacaancangtattgacttttnaaaggattgnctccctctgcctgctgnccatccatnctccnatacgccttagggagtggccantcacttgaagacggcaatanggaggntgaccacaaggatgatcgccaccaaaaggtagnaggccattatggccgncacagtccatgctcctgtcttgca

SEQ ID NO: 1389 - DNA, 492 bp, Homo sapiens
  misc_feature (1)...(492): n = A,T,C or G
gccaccaagggcagtactgtgtccacccaagcccacagctctccnatntgaagaactgctccatantcaccgtctgtccacagngttctcacanggntacattctnctaccanagggttctcatgcacaaggcagncangagtaggccatggccccatgggaggccaggtggnaccctgggaaggcgccatccagctntgacccnngaanagggggcatggcccctcagagagcnctntgctgcagatncgagncttttgactnncatntttatactngancggctacaaggctgnaacngacnaactgttgagtgtgngggaccatttcaggaccaggggggggagaggnncatttccagcttgtatctctaggagggctagggcctctatngtcaaagatngattttcccaacactggaccaaaatttgnatgaaaactttcncntgtaanaccataaatagcanntattttccagaaaagaattaaaaa

SEQ ID NO: 1390 - DNA, 491 bp, Homo sapiens
  misc_feature (1)...(491): n = A,T,C or G
gactgagctttcgaaaatgtgatcgaccggctgaaggagtcctctccntctggctctaagtctcagcgatattccagcgtttntggtgcttcagtttctgatgaagatttgaaaagaagagtagctgaggagctggcattggagcaagccaaaaaggagtcagaacaccagagacgccttaagcaagcangggaccctagaaagagaaagggctgcagccaatgagcagctgaccagagctgtccttcgggaaagaatatccagtgaagaggagcgcatgaaggcgaagcatctggctcggcagctggaagagaaagaccgagtgatgcggaagcaggatgcattctacaaagagcagctggccagactggaggagaggagctcagagttctacnaagtcaccaccgaggagtatcanaaagctgctgaagaggtggaagccaagntcaagcgggatgaanatcatccagnctgtgcagatctgcagacca

SEQ ID NO: 1391 - DNA, 488 bp, Homo sapiens
  misc_feature (1)...(488): n = A,T,C or G
actgaggatgtggagccctcgcctgattgatgggaggaaaagcaagtctctggggcctgtctgggcccctgcctcaggtgtgagtcaagtgtcgatttgatctgctgtcacctgtccctgggaggaagacctgccattgaaaggaagagctctgcagcagtttgtgttactgggccagcctcccttccatcctctcccgcaccaggtccaacacaggcccaggctggatgtctgtccttcacagtgccctctctggcccagagcatgtcaatggacgtgttggcatcccttcccctgcccctctaacagatgcctngnggatcangcctcatctcggnttgccnaagaggncatcgcccantccatanagttttactgagcaggttaagctggtcttgaatactcagnnttcctgcttcatcctcttgaatggacatctgccagcattnccagaccactcttcttaggtcatcgatgagctggtgtgg

SEQ ID NO: 1392 - DNA, 485 bp, Homo sapiens
  misc_feature (1)...(485): n = A,T,C or G
gactgagaggctggggagcagcagcatgcagccggaggagggaacgggctggctgttggagctgctgtccgaggtgcagctacaacagtatttcctgaggcttcgagatgacctcaacattacccctntnnatganacccnngatggagtagaggagtacctgacaagaatgtgaccatggagcctgnactgggaactngcggncattggcctggctcttatgaactggtacctataancagncggaaggaggcatcaganncagaaaaggtgnnaggatnttctntggcagggaccnggacccaangccccgnatgtnganggagacccnngnggcnccaggacttnnctgtaggacctggtactcncgtgttgntanctgatgagnncccatcagnctctgttgccaaagtcgtggccccagctatggatatctgcttcttccagagaaataaagcttgtttctattttatgttaaaaaatgg

SEQ ID NO: 1393 - DNA, 484 bp, Homo sapiens
  misc_feature (1)...(484): n = A,T,C or G
aaaaatccagtggcacnctgattcaancttntntttacttgtngccacagncttaaagangcaannnggaggatgcntnctnanagntgctagaancccaaggatncgtgttcaagacccaagtgactttctntagcccctggttctggccagggcttagcagccccttcaatccacgtggngnttctntccccgcatggntgctccttacggtctgggcccattttacaaatgagaanactgaggacaggtactaaaagcttanatcggaagttacctnatanttggggacaaaggncactcctgccatancctaccttnnntgngaaggtcaccatgaggctctttccactccctntggacgggttcccggnggtataccacatgggtcctcccaccancctntttntcctgctgccctcgctccaggggctcgatgaannaatntgagttntctgtgcngatgaggccggcctgggggcca

SEQ ID NO: 1394 - DNA, 483 bp, Homo sapiens
  misc_feature (1)...(483): n = A,T,C or G
gactgaggaagggatggaacgttcattgtagacagtgcctgatcttctctgacctccctcactctgagctgaatgggtcatggagacattatctgcaccactcagctatctacccgacactccctggcttctttctgccttagatggatcttttgggcttcttcagctgaagaaatgatgggaagacgtctgaggtactcacctctacttgaagcatttgggtgttctatttgattgcctgtttttcatccctctgcctctctggactgtgaactcctacagggnanganangnaggcaccncnnccnnacccnnaaaccagatagctgggnggggagcncactgntcattnantctacnacnccnacnggnggaanntgannagcacnncccgngcacctttttactggaccacaccattattcggcgggaatngggtcccctcccccttcctttcataactggggtcacaacaataaaatt

SEQ ID NO: 1395 - DNA, 481 bp, Homo sapiens
  misc_feature (1)...(481): n = A,T,C or G
aacaaagtgtggtgcanagactgaaggaanngccatccaganactgcctcacctgaggatncatcccatatantnaccanacccagacactattatggatgncnagntngtgcatgctgacagganccatgatataccgtgtctcctgagaggccctgccagagcctnaactgaagctctggngnnaaccatngaactgatcacaggctccccaatggaggagtnanaaaaaggactgaangagttnaagggatttgcaacccataggaagaacaacaatatcaactcaaccantactcctagggtctaatccaccaaccacattatacatanaggnacccatggcttccacctgcataagtancanaanatggccttgncaggcatnaatagggaagagagaccctagatcctangaagggctngatgccccagtgnagngggaatttctnagaacaggggaaggtgagagtgggtgaat

SEQ ID NO: 1396 - DNA, 481 bp, Homo sapiens
  misc_feature (1)...(481): n = A,T,C or G
gactgaggtggggtctttcagtactgcctcaaaatgtgaaatactctggcctcgaccntccgagtaagggtccaagcagtgctatgcagaaactgtgtttccctggagcaggctcagccagcagtctacaaggcgtacgcaaactgctagctcaaccccagcactctttcctgcaacactgcaaagatgttcctaagaagacattcctcttcagaactggaaaagtgaaaagctgtcaccagccacagacacacactctggagagggtgttaaaattcgagaggggacacatattggaaatctatgctttcctcttaattttgctgggaactcaaacagcaatttaagtttttttttgaanaaagagctatgcatatggatatagatatgtagcattttaacaccaggctacaagatattcctggtgtcctctgaagattctccattgaatataaattaaaccttctgagtaaaaaaaaaa

SEQ ID NO: 1397 - DNA, 479 bp, Homo sapiens
aactgaggaatgaactgcagtccagaattggaaggctcacctgtgatccagatcttaaggctggaagacacaagtttctgacccggatctcgacatggatgaggccataatcaggcaagatagaacacgcctttaattcctggagactggcgcaaggagatcactgagttcaaggtcagcctgggacaaagcaagtcccagagccaggtgtagtggtacacacctttattctgggccataccttctgctggagtcccaaataaggtctttggaagaaggaagattcactgtttttcgcctgcttgcacttacttgccagctcttctgttagaatctacttctacagaagaccagctgaaacaactagcctcgttggactgagcaactattagactcttgggcttcccatcctcaactgaccattgttgggttagttggactacagactgtaagtcatcacaataaattccctcaattcc

SEQ ID NO: 1398 - DNA, 475 bp, Homo sapiens
  misc_feature (1)...(475): n = A,T,C or G
ctgaggtagtgcttggtgctttnttttcgtgcccgtccntccatcacgnncanttcngtctgatgaccgtganangatatctccccggggccnncccngcanctctngctggccntcctancaaggtgccntgtgnnagggtgcgancctcagcgccctgntcccttcttcctcccaagtgcgtcagancaccaccanttcaagagggatgcctcacnttcaaagcntttctntccaggttcttatatgtttacccntttcccnacacagggctgaaagtcacagatacattctagcttgtttctaggaaggcttaaacaagcttgtgagtatcctcttacctttctgttgtatgtggaaattagtactcttctcagagacttcttgaaggtaactctgagcttttctgaagaatcttctcttgagctactgttcattattttgccacttaatactctgtttttaaaaaaaaaaa

SEQ ID NO: 1399 - DNA, 472 bp, Homo sapiens
  misc_feature (1)...(472): n = A,T,C or G
cgagcctgtccttgcctttntgcgtcggtgggcatgcggcgcgtggacnctgcaacananancggtcccanncggccttcncgtgggcagtggcnttgccangcacctggccaaggctgncntggacttcgtggtggaggaagancntgaaggnccacctcacntgctggtacatcnanaagtangttaaggataaccctctgccacantacctgnagcgcctanagncatgaccctggccactgtgtgcangattgcaccctgtgggccttctgtgtgggcctcanccagctnatgtgctntcaggaacctgttnccatggggacaggctcagagttatttttgcaaggacaccngtctgcagncttcatcnangattctggggaccagctgctggttgtggatatgtnaaaagccatantgggncnaagggcnngccaagtngtnaagacccatttcccacagaggtcct

SEQ ID NO: 1400 - DNA, 472 bp, Homo sapiens
  misc_feature (1)...(472): n = A,T,C or G
gactgaggatgtctaacatattcagaagaaggcgccccagagtggcctnggacctcangtcagctgccctcctcnggcagaacgancnntgggctttggaagcctaggttaagcagcttgttctgacaactcttccacaagaccccatgatcccatcaccactgcaatctgggantggactaagtgtccccacccccaggtgagggactacttgagttantaagggtgctaataagntnatttncctttatgcttctccacacatctgaccgtgtctctgtttttactgngtaaagctaatatgtctagccctgcatctgagatttaatggagagagatcaaagaaagaataaagaaagatgaaggtggggtgctgatgagagaccaaaggcttatgtaaggaacagagaacaagatgttggatgtctctaagatggtcagggagtctattggaaataaactatggaaagaa

SEQ ID NO: 1401 - DNA, 471 bp, Homo sapiens
  misc_feature (1)...(471): n = A,T,C or G
gactgaggaaaaaggtgaaggtttgaggangangaggtagctttcatctttgggaaaaatgaaggnatggantcncacanaggtatttagcgtactcnatcangncagaactacactcatgangcacgttcacgtatttntngtatctgccanantcaaganactgtacttccacaagnntctgatngcattgtacttantgccttganatgaggtataaagggcccagcgggtcctttgtaagtccttgataaacttactgagtctttaacagtgaagacaagtatttggattcagtgaggagccactgtttagtgtcatgtttttattgaaacagtttattttctatgttttattttaacatatatagggcctcgtctcagaatcatttatttgaccactactggatacctatgttgtgtcaggcatgcttttagtaaagggctcattaatgataaaaggaaatatgat

SEQ ID NO: 1402 - DNA, 467 bp, Homo sapiens
  misc_feature (1)...(467): n = A,T,C or G
gactgaggacatctggatgttcccaaatattttgatgttccacccagtaagccgccagggccatcctagaataccgagtccgtacgctgggaggagccctgaagaatggccagaacctgggctaccagggagccaagtttgcttgngagagtgcaagcactggcctggaggtctgccctgaggacatttatgggacccaggagatccatatcantggggctgtggccttggcctttcagctgtattactataananttatctantcaaaacanantactcttaggtgtagtttgctgnnagcccagcantcggggccaacaganaatgaactcaatggaattgctggacgttccttgtttcagtatcaggtcagggctttttctcccctacttttattttaattttttaccctancctttgngtatatattatagntttagttngngaggtttttttgggggggggg

SEQ ID NO: 1403 - DNA, 467 bp, Homo sapiens
  misc_feature (1)...(467): n = A,T,C or G
gactgaggatcttcttgctactgaaaagctctgaagaatatagaaaccaangttttaagaaccacgantaccggccgagagatgggtacnggccacntgggngacctacctnctggatnantacgttgagacaatgcnttacacgntggatctcangggaggatttcnnnnnnctgacgcttctttntgtgagatcggttncacnnctgtgnccgggctgcccnnnnnnccgcccgnnnccgcagaggccccgagggcncnnanggcangcccaacaagtaaantatcaagganaacacaccaggagtggtantcccntccagagagaactgaccttcgtgttgattcntctgcctgtgaccacatgctgtgctggctcaaaatagatcacattacagaagtgtcaagggaatctctttaagtaaacactactttgggggattgntnccttttgactatataggggg

SEQ ID NO: 1404 - DNA, 466 bp, Homo sapiens
gactgaggatgatattactctgttgcccaggataaattaaccttggactgctggactcaagcagtgctcctgcctcagaatcctcagtagctagactacatgtctgtactggtcccctatataactgaatatgttattgatattcagtaatccttggagttttctctcagtcagagagaattatttaattatttttgtgtgtgtgtttgtgtacatggcatctgggcatgagtgttgaagtcacaggaattggttttctccttctaccttgacttgggttttgggtatagaacttggaaaatccatctcaatagaggcaaatttgattaaattatacaaaagatgtatactaagatgtgcaaatgtaatcaaaattgttttaagtcttttgatcaaatagaaaacatttcttaagtaaactgacttaaagttaaaaataaaatatcacaacagtgaaaaaaaaaaa

SEQ ID NO: 1405 - DNA, 466 bp, Homo sapiens
  misc_feature (1)...(466): n = A,T,C or G
gccgcaggtagcagcaggcgccaccttggttccgggactccgncgaacttagganattagnctgancaggtgagagggtgcaccacagaaccggacngcttctgggacaggcgaagccacagagccgctgaggcagcacccttttcgggcctgcagagagcctggccaccggtcccgaccagaggacaggtgtcccgcctggctcagaagccctcagcctgaagagcagnggacgccaccttggttccaggactctgncgaacttangaacttagtntgtacaagngagagtgtgnnccacagaagntgacagtttttgggacctgtcaaagtaanacagttttntgggaaaggttntgttttgggnntttttttttannnangagganattttantnataanatanttgtatantttttttgnnagangagagtttgttagtanagagtgttttgagttattaaa

SEQ ID NO: 1406 - DNA, 462 bp, Homo sapiens
gccacaccaagtctccttgcacttgtaaagcacgaaatgcagtttgaccaggtatgttcccatggctgagtaaacatcacttctattcatctccacaaactctgcatcaacccaaacggaagctctgtgctcactaaacactaccttccaggtctccacccaagcctgtggtaacttcgacttcgttcaccgtctttgaattacaatacctcatataaagggagtcctatagcatctagaaaagctagcttttggtcctaggggataaaagacacaaccacacacctaacttcttaaccaacgcacaagtgcctgtacgcacgcacgcatgcatgcatgcacactctgtaggaagccttcacgtcctgcagtcccagactctcagtaccatggttatttgatgaacaatttttaattgggccctgaccccggttaaataccttttcctaaaagactcaaagt

SEQ ID NO: 1407 - DNA, 460 bp, Homo sapiens
  misc_feature (1)...(460): n = A,T,C or G
gactgaggtggaagaanaagctttgatgcgccgcannagcangnntgttcagangtcttancngtgaacctaagggacaaagccntctcngttaanttgtctnnttganagngnccnnggnnntnttntccttcttttggngcctgggngctnaagagtcatgtantttctgcattcctaatatngatattactgacttgttagtctacctaaggatgcatttatttttgtctattaaaagctaanctctagatgctgttttnttgctagtttaacttgatttagngtggtggnccccgacccccatctttatcattccctctatacttgctttggatgtattacgccatcttagttttaggaggtgnnaactttgatggnnggcttgatctgtcttttaaatataagcncttaaaattgtacattaccacaaagtatgagtttacctgcatttcacatt

SEQ ID NO: 1408 - DNA, 460 bp, Homo sapiens
  misc_feature (1)...(460): n = A,T,C or G
tctaccgccggacttnanagcacacccgcccgggtccccggcttctgacccagcggtaagcccccaaggatccgagaaccggaggagaaaagcaggtgagccgcttcttaggcgatccttgtgcgcaaccggataagagatttttgaaccacgcacctcgcaggccaatggagcaggcggacggagtgcggacaggcccgcaatcaccaagcccacaccactcacacagccaagctcctggaaacgcagatgctacgctccaagcgcgccgccatcttgcgcagccaatccgcgccgtgactggacagactactctcgcgagacttttgacttagcctaaagaaagaaggaactatcgcgatacttggagacggcgaganatgatctcacacagtccngggtgggctctgactctggctgtcgtgaggatgactttgnactgancctcctgactccattg

SEQ ID NO: 1409 - DNA, 454 bp, Homo sapiens
gactgagtccgatctatattagtacggttccactcggccggtgcacaccatccatgaatcagaagcagactgcaaactgctccagagatgatctacaccgcaccagacccaagcagccctacaaaccagaaagccctggacctgctaaaaactaacgtgagcccaggcgcccagcaaatgagactgtcccttcagctgggtcggcaaatcatacgcttgtggtgaatgcctcactgccctaatttcctcccctactctggctaacagaccagcctccctgggctgtgacagggagtcctaatttcaccagaaagtagttacagagcagagagcataaccccttctcctcaacaaagtgctggggtgctcgataccaggaaactccctggtaaaggaaacaaaatggtgactttgttttgttttttcccctttaagaggtatttatttatttatt

SEQ ID NO: 1410 - DNA, 454 bp, Homo sapiens
  misc_feature (1)...(454): n = A,T,C or G
actgagactcttacctggaaacgttaggatgccgctgagcatggggaaaacaatccacagaccgcnagaaaagcctggcaaagcgtgggtacgacaaccctgcccgccgcatggcagcctgccggagcgccacacgctgatgaggtaccagggcacccacagatcccaggactaggataaaatctctgcacaccctcgagtcccctaagcgaaccttggagaatgctgcataacacaatgagangggtgggcagctcagaggacggccatgtaactggttctaatttcagagcaatgactgcagcttggaatgatgtccctggctatggtttcnaaccaacaccctgcagaactcttaccatcaatcactgctgcactacacttaacactgaagatctacagggtttgaaaggcaggaaatgactgtctntaaaagatatgcggtgttatgcat

SEQ ID NO: 1411 - DNA, 454 bp, Homo sapiens
  misc_feature (1)...(454): n = A,T,C or G
agaacaagagggccacanaagaccnctccatcccanaaggatncaggccannggctgccnancctggcgntttgtgntaaactttgggggatnntnanagctcanngnncttnacattccctgctgacctgaactatacttcttaagagaactgactctaggcttgagcagcctgctcccttgaggtctttataggttggacagagccagaccctgtgtaggttgcaagtcctagcaagtataagtgcaggaaccctagaccacattatacaccaaacagctttctccaaactggtgaatggactccaggnttatgccctttaccatgaaccatgataaaaactctttcagggaaacacataattcctaaatggtaactatgtgagggaggagcatcctcaccgacagctaccctcgcctcctcggagatccacactgagacccactcacagat

SEQ ID NO: 1412 - DNA, 453 bp, Homo sapiens
  misc_feature (1)...(453): n = A,T,C or G
tgtggacacctggtcctttgctcctgtgnaactgagtncgtgaacatcatttgtgctgggtctgngtngnnngaatgacngaccctaaggaatcaaataaccttcnnacctccaggaggatcctgaaaaccaaaaccatcttgaagaacaaaattcacagtgcaatatcgaagaaggcacaagcagataactttgagatactgaccccaggtgggagccctgccccccaccccgtgcagggagagggtgggggtggnagcagggtcctcttgtcagcccaggcacacttctgggatcagtagtagagcagcactggtctactggggtaggtggtcagtggccgttgaagtcctgtggagagggcttaagtaaccgggggaaggagtaagggtgatacctatggccatgtgacctttgccagggcgatcatgtgaccaaccatcaaggttgggc

SEQ ID NO: 1413 - DNA, 451 bp, Homo sapiens
  misc_feature (1)...(451): n = A,T,C or G
ctagcagtgggctggnaatggaagtncctcangatggagcaagctnnnagtgggtgngagagaanagacttacnggtaggcntcgggncngcgggactcctccggntcagctggngacgatcccgtgcggctccccgcgngnnccgatnntgcnccgaacntgtntnncgnccnggncttcctccgcttggccnanagtcaagcganaaacaagagggggaggntgacaaccaaaggttcctacaggctatggaagttctgttgtcaacattggagaacacgaaagantcttcagactgtacttaatatcctaagcattctcattgagctggtgtcatcgggtgagttttgattccctttgatttggtgtgtatttgtaaatagtgaccagaagtgtgtcctgtgtacatcatttaaactttcttgatattaaaatttgggaaatgaaatg

SEQ ID NO: 1414 - DNA, 449 bp, Homo sapiens
  misc_feature (1)...(449): n = A,T,C or G
ccatttctgagacctctttttctcctncacacccatcacggggcatcactgctggtctggttctccttccagttttggtcactggaggtctgnctgcanccatacccctggaatattgcctgaggnctaggactaanagtttcctctggaaccaaatcgttctgcattcngntctctgcctttatcctcccagagatggaganggangctaacgtttatnatttntatcattttatctccaccccttaacctcaagtcccagcactgaaagtctcnaaaggaaacagagacctaggccctccctcattctgttaaacaacccancagctgggcacagcctgagtccttggctccactgnggcgggagtcctgtatcttgcatcnnatntggtggngnttggntttttgnattntgtncttggatangaangctcaagtttggagttttg

SEQ ID NO: 1415 - DNA, 449 bp, Homo sapiens
  misc_feature (1)...(449): n = A,T,C or G
acagctcagtggctacacagtaggaatccctgtctnataaaaaatgacncacgacacanncaagnacnnctaaatactgagatcatnagcacaccaancctgacaatgcaaganagngangtccgttcngcctgangatgcgtggaaggaaactnacagagcnngtttgttctgcattatgcgcttatgtgggnnggnggtatcagtttgagatatctgtggnttaagagctttggnatgctggtccatanganccatgtttnattctcaccacncncatatcagctcacaaccttntgttgctcctattccaggagatctgacacnttctttcggccgcattctttnngcctctgaaggcacaaggctttaantggtgcacaaatntacagatntgaacacgttatgcgtaaaatgntatttanangttgatcttaacagaaaaaaaa

SEQ ID NO: 1416 - DNA, 449 bp, Homo sapiens
  misc_feature (1)...(449): n = A,T,C or G
aagtgtggttctctcccccatcaaggaaacttccctttgcaacagatggagagagaccttacagaaaaccacaaccaatcagaatgcaaggttgtggaacccagtcccaatgcatgtgtctacaaaacactctagcatctaaggctcaaggaacngttgcagaagagtgggagacaagcctgtaagagccagaggaacacagagtttgctgtgagntggtgactcctagtggttatanaatntncacntntanggttngatgtctntctaacntgngctnacnagggacngcanttangttgttttnnttgangcgnggatgacctcnagtgctnagtcnctanccatggatcttcagncagtactggactgctnatnctgnnggntagnggatttntcaggaaaanatcacatntcttgtntatacnataccatttgtcctagacatg

SEQ ID NO: 1417 - DNA, 448 bp, Homo sapiens
  misc_feature (1)...(448): n = A,T,C or G
gactgaggattaagaagtttgtactctctgtgtggctgagaagttnttcacctantgnannccggctagggtacgggnaagcaggtgcnctccnaatcgagagcgcgnactgcagcctacagtnccacttgcagactcatngatgcaactgtngcggtaacnaatgangncattagcatcatataacccagnctaacntgangtaangtaagagcctcttgatttagaaaatagangcgtgaggangacactattnaagaanggggtccagatnatgangacnntgngagactctaangatatccgcctcactcttatggaanaagtattgctcctggggctannanataaagagtgctantcttctataattctgntggcaatctgaattgtccttnaaacnagaagttacaagnggctangggaagaaatgaagaagttattttcc

SEQ ID NO: 1418 - DNA, 447 bp, Homo sapiens
  misc_feature (1)...(447): n = A,T,C or G
gactgagctagtcgaancaaccaatgagtcctcntgttatctaaattccttgaagcggtctaatcgggttgctcgtaaggaaacactgttactggaaaggtttggaagacangananngacccaaatcattaacgaaagangcatatggaccanatgtggacactggcatcctccccttgnccaaaaacaaggggacagaanagaagctgaagtgacagcccaagtcttcctcctggttctctttgtgtgtttttcctttngactnatctgagcatgcccatggcatcggggttctgtctattncccatcaggtctacttctaaaagccagggacacactctgnncgccattatctaacaggcttacatggcagtcagtaggtaagaataaaagacttcctgtnttccctangagtgnctttaggtagctnatcctgccaacgctgg

SEQ ID NO: 1419 - DNA, 446 bp, Homo sapiens
  misc_feature (1)...(446): n = A,T,C or G
actgaggtactatcgggacgtgctggactagcagtagcactccgaatctgttggagctcccaggcgttgagtgcatgtgaccaggtcagatgggcccttttgtttcagctgacctctaggcacgtgcctaaggagactacatttcccagcctgccttgcagagatttcccaggacctgntggctttgtctggccaatgggagggatatgaagaaggaagaggaaggtcttgaaatagaaaagtcctgggttgaggaagataactcaaacggaaagctaacccatgctaaccgaaactttttgnaaggatgcctttggaagccggccatgtggctcctgccttgctgggcacctgcaaatctnaggctatcctgggctacacagngagactgtgttccaatctcagttctgttgctgctattaaaatactgactaaaagcaaaaaaa

SEQ ID NO: 1420 - DNA, 441 bp, Homo sapiens
  misc_feature (1)...(441): n = A,T,C or G
agggcatagcctgtggangacgtctcagagcnnatgggcaggagagcacnattngtacatccaggnatnngcntnnnanttncatnngcncntcntgangannnnctacgncngatnacctncagactcatnatgtacagactgtgacatgagaactgaacgtcanncccattagttggnggnntnnatcacctngcttntgcatgacaagaaatatatggtgaccattatttgctcgacgcctcagaagagaggcatantaaatgtgcccgtcgggagtgaaaggcagagccacattctaaatcaagtaggcattcatattcctcaacaagcctgaagagatcctacgggggttcactgtgactcaactgtgaaatggacagcgaaatgaacgtcggcccattattgtggggtttaatcagtacattttgcaaagaaaaa

SEQ ID NO: 1421 - DNA, 440 bp, Homo sapiens
  misc_feature (1)...(440): n = A,T,C or G
acacaggtactccagaggctggtgaacctgagcggaggctgggacgccctggtgggccccgggccctgnaaggcangncccggnggctggtgncccaaaatgangccagctcccagcatgccctgcaancgnacaccagccactcggnctgcaccaacngtgataacccattcattcttcangcatccaacaaggagcctgggantgggaccatgcanaggagcccctccactgntcatgctcaggtcccaatcctacagacacagatggtgtcggacggcatgacaggcagcaattcctgagtctcntgcctcatctagttctccanaatctagnggggcaggnggnntntcccnncannntatangntcangattccctnactgganggaccttcaggcccacnaagangggcncccacagctttctctggagggggt

SEQ ID NO: 1422 - DNA, 440 bp, Homo sapiens
  misc_feature (1)...(440): n = A,T,C or G
ggtatagaatgctcgngccatcccaaangacagagctgctcgcagatgcccagacttgatctgacccttactgaaccacancaactggatgtgggngtagcttcnaagctccgggtccacacngnnccttganngggtngtggntacaannaggaaaaggcgtcgnganataagncaccgtgctcctgtctgctaagagcaggacaccagggtggcatgattccagnnctgggctccatccagtgacttaaaagaacaactggtagatccaagaggggaattttctcatctccaggactgggaaggatgaagacaatgcatttgttattttctgccctcagggaggacatgtnttcacgagtgtgggaaggaaactcaaatgcattgtgaattgtgaattaatcaataacatccttctgggngttcacaccaaaaaaaaa

SEQ ID NO: 1423 - DNA, 439 bp, Homo sapiens
  misc_feature (1)...(439): n = A,T,C or G
gcatggttggtcccatngcaacactgaangacactgnngngctnacantgntgccaccagggcctttagctttgaanctctcagcctccanaggtgcctatatcanncagatnggctctgaacagtagatgcagattgangcgtggnctnnaactcctgnngacatctcccaagacttggccttatatgtgtgtgccaccatgcntggaattcctaccatgtaaagtttaaaactcaccaccagagccttctcagactccacaatattccactcccgattccgctggttgatgtagctataagaatcctgtgnggnggaaatgaaaacncnntgagaagnttattctgtntgacggggaagactgncaacttgnctagatctgaatnncatagaagacaagcnttctaggtatgcttgatgaatgggatattctggact

SEQ ID NO: 1424 - DNA, 436 bp, Homo sapiens
  misc_feature (1)...(436): n = A,T,C or G
gactgagggtcggagcttcaccatgggctgngcaggggatgcgggctgnacncctcgtccgcctatacggcctcggcccgcgtncgagcgtcgtgtgatgatcgtgctcttcctcnnnctgctactncacctcctggcgntcacgctgntgctgcctctgctgcctggnctgctggagagacacaggccgctgaacaagaccncctctatggctnctggcngcggggggtngactggtgtgctgcagccatngggatgccagcggaaaanaggtacaacagngncctgttnggaggncttatcnnctcggccttctccctcctgcagttcttctccgcaccactcacaggagctgcctctgattacctggggaggcgcccagngatgatgntgtccctgacagggcncgacnatcttctatgcagagggggctacc

SEQ ID NO: 1425 - DNA, 431 bp, Homo sapiens
  misc_feature (1)...(431): n = A,T,C or G
gactgagggaccagtagnctacaacccctgaacatgccctgntggtgaagatcatgcttgccccatggacttcaacaccctcacacagcaggaagtagtttaatgataatgtcctctttcctgactcctgattagttatcaatactaaacataaaagggaagaaagcagggaaaagggccaaaggagggacagcctgccactggcnttgagcctggctcttgagaccaggcaatccccttccataggattcagcattaacagcagaacgatgctcaggacagctctggacttttccacctttccatgcntcacctgtgcatggtcctaaaacctataagagcctttccttcacgcagccctctgctgtagctgttctcactgagacagccgccattctgtgtctctctccaataaatctcatgtgaagttt

SEQ ID NO: 1426 - DNA, 430 bp, Homo sapiens
  misc_feature (1)...(430): n = A,T,C or G
agggcaggactgaatgttcaggatggacaagaccagtngctactccttatggagcctgtcacntcacaccntngaggaaganaccaggagggctattttgggcagtnntaagatgctcctnggactgagtaagtctctcttntagacaagacatgggggaaaaaatagcttctnggggggatgcaagagtgaaagtctccanatttggagatcactggagaacattcaanncatctcnacagntggcatcctgtggnnagtgcttgcctaaacgcttaaggaanagcttgggtttcatccccggccctagagaagacagtgnnnganacgaaganggctttgagtancctacantgtgtaaaacanagaaggcntttntacangctaaacaaaccatgaaaccncgaancctcacaccctcgttactatc

SEQ ID NO: 1427 - DNA, 425 bp, Homo sapiens
  misc_feature (1)...(425): n = A,T,C or G
actgagtgttcctcttcaagancctccacntgctttccntgtgtgcttgagcaagattctccccgggcaaacccccggttcggaanaccnnccccgagcntgntggggtntgcnactcgatcccgctngggctttgtacgcnnccgtcaggggtntanctgttnntggncnncactntttnncntntggaacnncntgcaggnnnncantggcagcctccgttgttaagcgtaccnnttcctaaggtgcgtaaggcctcgggtttgatccccgacaccacatcctctaggtgtggnggtgtaaccctgtaattccaggactcaagaggtgaaagcggaaagattcaaanttcaaggtcatatttggttgcacagcaagttcaaggccagcttgaaatatttgaggccatgtcaaaaatgaaaaaa

SEQ ID NO: 1428 - DNA, 425 bp, Homo sapiens
  misc_feature (1)...(425): n = A,T,C or G
attaaagtctcatctgcctaaggaagagaagactgtcagtcnaagccagcttgtttttgaaaggcagttcanagcctnaaggctcagccaggatatcaaagaggcctgaancagaagggtctggntgttgggaccggaccacagataccaccgttcctggcctgngagcagatagtgtgccngaggccatcactggtgggaatgaagagtganggacagccctagcatcctgnnggagcatctggngtccctgcntcangcagccangccaggcctccngtggccataaagtttcaccnctccacctgttgcntgcaacttgcaaatacatgactggtgcagcttttctctaggtatagaaagctatagcntgtaaatattcnnatatcagcagcttaaatttttaagttctggctgtgatctag

SEQ ID NO: 1429 - DNA, 425 bp, Homo sapiens
  misc_feature (1)...(425): n = A,T,C or G
tctgagggcatcaagagcgggtctaccaggnctcattgctgcctccnactggccctgagatnntnaagggcacanatcatanncagacgttaatnaaactgagcnataccttnctaagcnctaantnnantgnctantctcnntntagacanaatgaaccccactancatatgccngtgtggtcccaaagcatactcacagaccactctgggcctgcatttntggngcctacttgctagtccctntgggaagcnacctgnantgngtgccctgtgacatctcccctactgctgccttctatcagagtgtcaccagtgnctaggcatctggtctgggctnctcggggttnaggactttntctcagnctgccaaagcctagcnctgggntcggntcccaacaaggactcagcgtgtccactatttat

SEQ ID NO: 1430 - DNA, 424 bp, Homo sapiens
  misc_feature (1)...(424): n = A,T,C or G
gtgccttgctcctgccagtgccccnctccacctcaaggangcgnntgancntcnttacctccaattggnttcaccttcaattgtggcangctagccacctgggagagagncnncatggnagacactganggattctgcccacagttaattctgnanggtanntaatgccngcagccaatatctgaagagaagagacntagttggggttnnggtttcccaggccaggaatcatganaangaagacnggngatctacaaggccagaacagtgtggngangaggnnagacatcatccctgagaanagnacaggacagagtggnatggctgccatgngagggaaccatgagacatggnctanaccacagcccngctggacagccctgtgngtccagagaggccaagatggagtatagaactagtagga

SEQ ID NO: 1431 - DNA, 423 bp, Homo sapiens
  misc_feature (1)...(423): n = A,T,C or G
agtgatgcctttctaaatcacgtctgctcggacgtgacgcgcagagcgcanagcccagagcccacnactttgtcgctttatcaatctccaggnctgttcccaaacaacagcgtcctactccatcaccaggattaaatcgcctccccctggaggcgctaaaagccatgcttagtaagagggatgtgtttctacagcagacagcaggagggaacaagagtgagaggaaagagaaaaatcttgggcaggtaagatggctcaacaagtaaaggggcttgccagcaagcctgacgacatgagttcgattcccatagtagacagaatctatttctgtgagctgtcctctgatccccctcatgaatgctgtggcatgtgcacacacatacagatacacacaataaaaccaaataaatgtaaaaaaaaaaa

SEQ ID NO: 1432 - DNA, 420 bp, Homo sapiens
gactgagaagggtttctcggtgtagccctggctgtcccagaactcaatctgtacaacagaccggccttcaactcaagagatccaagtgcctctgcctccagtgcgcatgcacatacagggatgtgtatatggaggtcgaaggacaacttcagggcttcatcagccttctaccctcagctctgcctctgactggctagttctaaagctaagctcaccgtccatttcttgtgcctgtgatggcagcttgctctccacgccctgttcactcactagggactgcaggttgaaggcagcatcctgcacatctggacgcgtgatcggtctgcattgagcttcatcccctacccagtttatcaggagctttcccccccaccagccccgccctgtttataaaattctttcttggcccaaaaaaaaaaa

SEQ ID NO: 1433 - DNA, 419 bp, Homo sapiens
  misc_feature (1)...(419): n = A,T,C or G
catggccggttcggggtggacncnctgcacggccggcggcgctctgggcntgtnaccnacncngcgngcctgaangccttgcangnggtcattcgcngcggaacngtntgttcncacatnctctgaaatacatgccatgctttgtgccctgcgtgcntgccagcctggcattcagggcntccttgcacacattgntncattgactccanccactngcnnnctgttncccaagtgggtaatntgaanagaattacttacactgctttaatcgtgtatccaanacctcaaggttctgagtancatcctaaccttgnttaaatcatcttctaactggactacatactgattgttcacaccagagagaaagcttttaacaacaacaacaataaaatgtgtacagtggcttgtaaaaaaaaaaa

SEQ ID NO: 1434 - DNA, 419 bp, Homo sapiens
  misc_feature (1)...(419): n = A,T,C or G
agactgagtgatggtggcaangtgctatgaanagcggtcaggactangaacaagcccatncctgtccttggctgcaggctgagagcgcaaactgcggctgagttctgagaccctgtgatccctctaccgccaatcctgaagtaccagaagccntgncataccacgaagctggancgcctnatccgatgcctgcttcaacccccagcctgcttnctgctacctgttgtgctncanagttnctgttctgaatgactnanttgcctaactggcccttatttgcatacgtgcaggtgaagatgacaggncctgnccangggacagttgnnaaggcctaacaggctccctgggagaaatcctgtancctgtgcggnccgtggtaggggacacttcataagcgttgnatctttctgtgcttgatc

SEQ ID NO: 1435 - DNA, 415 bp, Homo sapiens
  misc_feature (1)...(415): n = A,T,C or G
gctttctgcactaccaccctaaancaaactcacctntacatgncntnggantgactganntgcntactntnactcattatgtccnagacatacacngnacttgcagncatgtcatgatngccanangacgccacctgatnaatgaggaactanaatnacatanatcatccagncggangacgcgagccttcaaganttggacccaaaggtcaaagaccttnacggttgttttcatgttcgtcccacgaccgtagcggcagangggaaaccagcaggccttcttcagggggagaggncagatcgngaggacaacttgaccntgngcaactttaaactggccagncgggcnngatctttaanttagacgtcatggctgnattctcagtgtcctgctnttcctgagcctgtcctgagt

SEQ ID NO: 1436 - DNA, 414 bp, Homo sapiens
  misc_feature (1)...(414): n = A,T,C or G
aggtcggacagtaagcacngctgggtccanaacgcantanngaaaatctnacgaggcgngcagnctnctccagcctgcttgnggatnatatcnancagntntaagagnnnnntcagacgtcccaacactggctactcntccaggactnnctgncccanccagcggtccatatctctacggggatcncnngcnnatnatgtatgntctgnatgnacttccagcgcttttcncacaacgagagtcaccacgcctaagtctgcggccagcggtgtgaacagggtgaaagacggaggtgcctaanatgcccaggcccagcagcancttccctccgaccctgctggcaatgtacccacccgggaatctgngtgacnatgtagccgtaaaaaaagagccgagaatccacccttgagtttt

SEQ ID NO: 1437 - DNA, 412 bp, Homo sapiens
  misc_feature (1)...(412): n = A,T,C or G
ctttgtgtggtgaggaagccgntgcctactnccgntacganaaccngtggtgcccatgatcggntgnannatgcaggcnntgacagttnaggctgcatcntcccttgaaatcangatcaggaagaagactgnccgngattganttgatctgntcctggattnttcacattanctccgangncatcatgagccaggactgntngacncactgganagaagcatgattccgtgtgccctgngncagtnnagtgtccagcatcctgacccatgaatcaaagactactgtctnntttgccttgactcacanagtctgaacctgaccttcagctaacctcacacagaacaggagattatacctaaaggaatgaaaagaaagctgattcctggaagcatggntgaagtacccatgggc

SEQ ID NO: 1438 - DNA, 411 bp, Homo sapiens
  misc_feature (1)...(411): n = A,T,C or G
tcaccaagccttccaagcacattctagtagaagtgcagattncatgttcaagacccttagtgcttacagggtgtacctcagtgcttanaacttgtgcttagtatgtacaaggtcctagtggaatacctagcaccctccccacaaagagcttctattagggcaggagagagatactgagccaatagtgctctaaagagacacatgcttacaagttattgtcggggtcagcgaaagcatatagaacacggggaatctcatttaattaaaagacaacgaaaggcctccttcgggaagtaatatttaactggactctggcaaatgagttggaggcgaagaaaagggaggagaagcatttcggaaatggaacatagaaaagagagagaaaggtacagggctggacttccaaaagct

SEQ ID NO: 1439 - DNA, 409 bp, Homo sapiens
  misc_feature (1)...(409): n = A,T,C or G
catcaaccacaaagccanggagaangatacangattacaggtaagcctcccaggtgcgtgaaacaatgtgtggagtgtggcaggagaaaggacaccaggccggccaaccagagatggcaccagcaagacgctccctgcacatcagtcaagaggctgtttaactgggcaccacaacacctgcatgaaagagagaagaaaatgaagcctgggcaacaggaaagatagctcagcgctgggttaagagcacctgctactcttccagnagacctgagttcaattcccagcaacctcatggtgctcacaaccatccctaatgagttctgatgccttcttctggcaggcagttgtacatgcagatagagcactcatatacataaaataaaccaataaatcaaaagaggaagaggaa

SEQ ID NO: 1440 - DNA, 409 bp, Homo sapiens
  misc_feature (1)...(409): n = A,T,C or G
gactgagggtttctctgtgtacactgnctatcttggaacncattctgtagaccatactggncttgaattcacagatatcttgttgnnagctnttaagacancantattgncctgatctctgaattgngcctcccccaccccaggaatganaagagggtnaaaagcggaccaccancncacctgcctngnanaacaaccacangttgttccngccctaantcagagccagatgtnctgancacaccctgataccgncaagtncctgcttncccatggaactgnttaaagaatgtgctnttntattggcggacccctgccgctgataagtacctgtacttccccttttgcttgtgcatttaaaccttggggcctggctaatacagtggaaccttgatgttaaaaaaaaaaa

SEQ ID NO: 1441 - DNA, 408 bp, Homo sapiens
  misc_feature (1)...(408): n = A,T,C or G
cctttctactgggaccagagattatgcggnggnaatcntnnaccctnccncttccttcntannatgaagacacggcaantaaaatcnngngcctngatccgagagaaaaangaccnaatnaaggaatatatacgggcgtggatctgaaccctganacaaggagngccatttgntactggattggtgtttgatgnacnactaaatgacttccattgnctttaggangacanaganggtnaaagntggcaccttcaaatgatccccaaactagaacatttccacaagtgcccctttcttctcacaaacaagagtgaatttttgctgcttctagcctgtagcctggaagnaggtgatttagggagatggggatcattcttgaaagatttctctgntaagccaataaacagt

SEQ ID NO: 1442 - DNA, 407 bp, Homo sapiens
  misc_feature (1)...(407): n = A,T,C or G
ctgagggtttactttgngtgggatctgccgtgtgacttgcntntacggccagttggaagtatacggtcatatcatcanncaagggcagcctccccaagatgtcttttctgtctacacccactcttacctgaccatcaatggggttcctgtacgcagaacccgagaaaagtgagaaggctgatcaggagggagatcctgggccctgctcaagccttacacgaaactagatgacagaaanngggtggtgcggnacttccctcctctgggctccattatgattcttggaacggatgcagtctcgttttgnggacttcctgaagacctataagtgctcctcatacgtgctcctgcaggagaacgctcctgttcgggtcaattctgagtttacaantttgaagaaaattggc

SEQ ID NO: 1443 - DNA, 405 bp, Homo sapiens
  misc_feature (1)...(405): n = A,T,C or G
atcccaccaaccacatggaggctcataaccacccggaatganatctgacgccctcttntggtctanagagaagccacttgngtccttccgaggcagcccatccanagaaatcaaggagatggcatacanacttcaaacttacnagggagggtaaaggtggggcagtttcctaggatggcnctgctctngggtgacgccaggntanangcttctttcaagnatgnntngntgntctgtgntccattgggnaancactnanacggcttctagaatgttctgatcctganagcacagatttccnggangtagagtncacacttttatggacctgggctccccagaacaaaagacgctnttgcaaaaattgtgattcatgtgagaagcaanattttcagtgttgtaata

SEQ ID NO: 1444 - DNA, 405 bp, Homo sapiens
  misc_feature (1)...(405): n = A,T,C or G
tcacccctctttctacccagagtnactgctgtggccggcgccattttatgcgntttgtcanaaccggntcgcgctncaaggaggaggacctgcaggttatccatgcagncttgtgnngagatngtgaancttgttcatngnaaangngggngggggaggccacagatcagcgagatccgctcantnttgtagcagtacaggtaaggtgntggaatgagacatnattaannaangatggctttgngcacatagaggacatnanggccgctgaggatgccntacgcaacctgcancantacaagcatgctcggagngaacatnacngcggaagcccagcacgaatntnagcnangcttcaaccangnnacacgggggcaaacttcaggccccacttgtaccaaccaa

SEQ ID NO: 1445 - DNA, 404 bp, Homo sapiens
  misc_feature (1)...(404): n = A,T,C or G
gactgaggtctgggataagaggctgcttcccagcaggnggttatgattngcctcatgcactancagggggtgattttgncagctgcagataattgaattgtggggcctntggagagggatnaaangggagagcttcaagaggtccatgtggcatgcgtgcatcctgctcctgctgttgcttcctcttgctgnggtttgncaccgtggncatgagtaaagcnactacatgaaattggagacngcctgaactaaaatngcacttgcccnaangnacctganncccctnnatcaacaggaagtantctaaagtgttcanacacacccttaaggacggantgtgtntggtggctgcggacnctgggggctgttgggnaggggttngggnctagcgctgggttggcccg

SEQ ID NO: 1446 - DNA, 404 bp, Homo sapiens
  misc_feature (1)...(404): n = A,T,C or G
atgcccaacgaggacatcgacgtgagcancctggagcggctggagangtaccggagcttcgagcggtancgccgccgggcggagcatgaggcgcgcgccccgcacntggtggcagganctancgggancatttcgtgaaggananagntgcggtancnangtattntccnccagtttggtccccntggnccccccgnaacgagaaggacctgcatgcccctcacacttntngttctgaatttaagcaaacgtccaagtgatatacncatagcttaatctgtctgtaaaactgaaactcagccggatggtggaggcccacgcacttaatcgcagcgtttaggaggcagaggaaaacggagctcttgacttaggggctagcctaatctacaccgtgagttttaaga

SEQ ID NO: 1447 - DNA, 404 bp, Homo sapiens
  misc_feature (1)...(404): n = A,T,C or G
actgagtcttgcctccagcatctccatcctccantcccnatgccagtagtgatctgaaacgcacatatgatcttgccactcccctgcttaaaacccaccaacatgcaatggttctgtaaccccaggntagcctntgacaaggnctgaaagcacaaagccaggcttttgatctcaggnagaaggatcctttnccttcctgcttgggttccacctgcacccttngacttccgnnggaaactgctgnccgatccgctaccttgcccacaccctggacatctctgctctntctggcccctttctcagccctccccacagnctgggccctggccgttcctgtgagccgtcttttcagctttncctgggccttagctcttctcactgtactttttattttttatttttaa

SEQ ID NO: 1448 - DNA, 404 bp, Homo sapiens
  misc_feature (1)...(404): n = A,T,C or G
actgtatcgtgacattgaaggaattttgaaagangcttcaagcttagtagccacatntattgttggtcttctcacccttaaaaagagaataaatgggatgtttcagaanagagctgtataaanagaagagtattgcaaatggctncngaatctaccantgggaaacaagctaggagtcacagtgacaaaggggcagcgtcagtaccagcaccagnaccaacagcagcngcancagcngcancangtgaggagcagntcctctgtcagtgagtgnganggcggacnactccttcatcttnnaagccaacgaggcctggaaggactntcacggntctntnctgggcttctatgaaaacggggagctctgngacgtcaccctgaaggtgngaccgagctttactttt

SEQ ID NO: 1449 - DNA, 403 bp, Homo sapiens
  misc_feature (1)...(403): n = A,T,C or G
gactgagcatccccagcggcacagcgtgaagcgctacaagacganacttggaacggctcacggcgcangctgtcattgcaacggcaatgcaganaagatccatttcttanaagtgtttttatgactgcgacttccatgctgaccttctgtgtgagccctcagcacatgagacctaaggaggggtcccagggagaccctggtttcgggtggggactgcctgtcagcggctccccttagtatttgcgcttggggctcatgcgcagggcggtacccggttcacggagagaggggaaacttgcagaggtgacagcgagatttttttccctgtcttttttttccccccctgctttcctntttacggaacattttatgggctgaaatcttttcaaaggcccctacttga

SEQ ID NO: 1450 - DNA, 402 bp, Homo sapiens
  misc_feature (1)...(402): n = A,T,C or G
gaactgaggtggggtntttcagtgtggccttcctngcntgtnggaagtgganntcgttccccactgctggangttgctntgtgcccttgcttcccntgggcacacctgggcactancacaccagggggtcatgtggactgcacatctggaatccagcacacgtgaagcactccgctaacaccggctgttgtgcagacaagacagcgccagtgtagaaggcctgtgagctgtggaactttcctaggaaaaccaagacttaagccaaatacctccttccttctcatcaagatagagatggtaacagctgctaatccttacagctatgaagactgagggaatggctataaaggcctggcctctagaaagcgctcaacaatcactttgtggaatcactattataaa

SEQ ID NO: 1451 - DNA, 401 bp, Homo sapiens
  misc_feature (1)...(401): n = A,T,C or G
ctcgcctggggctgcggactcctgctgtggtnnancacgagancccgcatgactgcgacaaacgcctgggangtggaaccntcatccggtgcgtacaaagaagcctgtggcaccgagggcctcaggtctnntggggtnttttctgcnctaatgacctgatgtgggaaaggcctcagtccccctctcaggaganccaggatggaataagaatgcaggctgagcaagccattgagagcaagccagtaagaagcactcctctgtgatctctgcttctgcttgcattcctgcctccagatccctgtcctgccttgatttccctcaatgatgacatgtgtctgagatacataagccaaataaataaacccttttctccccaagttgcttatattaaaaacaaaaaa

SEQ ID NO: 1452 - DNA, 398 bp, Homo sapiens
  misc_feature (1)...(398): n = A,T,C or G
gactgaggacctacccaggagagacccttcccaatgccaccttntgcctnatccctggtcaccgatctgccacctcctgctttctccaagcccttcaggggggctgatggtggccngnggtggtggacgaatgtgagcaagcnctgngctnccccaatgacngcnctgcccnncaggccggttggatnccngtgctcctcanccnccgctgnnagctgcctttctctgaaggcatccgnctggaccaaggcagnncatgattgnctgatgagagattcccactgcacnancctggctgccctgcgtgaaatgntacctttaagggtcctcnnnctgcgccngcaganncagnttctgtggaccgnttacttcctntggggggaaaaagatatccatac

SEQ ID NO: 1453 - DNA, 397 bp, Homo sapiens
  misc_feature (1)...(397): n = A,T,C or G
cttatagtcaaggagnttanctcacccacctgccagagcgancnctgttcngtcctggtnattacagctnantgttaaggcccttgnnggccacanaaaccctccagcattctgaggaccagcgagcgacaggctcagttcagggaaccacggtctcacacggagcccagatgacgggcacgaaattgagtgtctttgctcgactccagaagtggggtctgaaaagaggacgaggggcatagcatacagaaggggcccttgtcttccagggcatcaagacagtgtgtgatccttccacaacctagctccttacgacagcaggcccagcaacacagaagacagttaccgccgccgccatttaactaataacccttctttcaaaaggaaagaaaaaaaa

SEQ ID NO: 1454 - DNA, 396 bp, Homo sapiens
  misc_feature (1)...(396): n = A,T,C or G
agctctacacatccctgtaggggccngnttagtncaganccaagggtnaagagctattgtctttctanaaagccatagaagaaactcagagaaancgtgtgtggctcagaagacanctgtgatgcattnnaatgagagcngggncagaaaaaggcaggtgaaggctccntgatctgtcanacgggagtttgaagaacaaccctgtcattgcagtggtcatgngtctccatcctctgcttgntnctctttcttcctttctttctttcttccttccttccttctttctttcttttcttttttctttctttctttttttccctagactggctntgaactctcggagctttgcctgcctctgcctcccaagtgttggccttaaaggtgtgtgccacaact

SEQ ID NO: 1455 - DNA, 395 bp, Homo sapiens
  misc_feature (1)...(395): n = A,T,C or G
tttcctggctgaccctganaataancanctctgtccgcttggtgnctgaagttggtngaagatgattacgaggaganntaacaccaaagccctgagcaatgctttgcagacgtctannggctcaggangtgtgatntagcccaggtctatttgtngacatcaagcttttgaaagcatcancctttgagagngggacattattgnagnctatggagtcacntttacctggagatatnagaagggtcatgaaccttttcgncggctgtcatngggatctgnattantcattnaccatcancagcagcaangagacangatttngtgntgggaaagggaccttccaantgcttccgnggggacanaaggggcancaagctcttgcccccagggatcat

SEQ ID NO: 1456 - DNA, 393 bp, Homo sapiens
  misc_feature (1)...(393): n = A,T,C or G
gactgaggctttcatcccaggtactccggcagcagtagaggatcaacagcataaggccaggctgtgctgcccagggagagtctgtcctaagaaagactgaaatccccacaatcctctgcagtactcctgtttgccccaagcaactttccacgcatggggctggcaagcttgggcgtgtgagatgactttntgggtaaaaggtacttgcaatcaagccagatgacctgagtttgaactcccacagatngtgtcctccgacctctacagnaacaggcnctgagctactggccctttaagagtgcacttnttnccccncgtgctgtntggntgggcnggtcgatgctgacactatgcttgacgtcaatagcngttggtggagtttggtcacgagga

SEQ ID NO: 1457 - DNA, 391 bp, Homo sapiens
  misc_feature (1)...(391): n = A,T,C or G
gactgaggctggactcttctatgaaaagtaacgtcaatatacaagtgaagtctgtttcgtgtattccaaatggcntctgtggtgagcngagaaaaggctccantacaaanacngcncaaaggccttccnggntccgctgagcattttgaagcatgagccagagaaacagcccttnggactttgatttgtgcttttcggnacncacaggtggagagtgggcggntgacatttcgtagatatttttgnatcgttttacagttctccgctttaaatgagggataaatctgaagaagttgcatgcaacccaaattgtggggtttgaaatatcttcatggagctggctgaataaagggggcaagcaagtgttgtttcttaccgtcaaaaaaaaaaa

SEQ ID NO: 1458 - DNA, 391 bp, Homo sapiens
  misc_feature (1)...(391): n = A,T,C or G
ttaaaaaagatactcagtattgtctctcagatactgtgggggacatgttctttcatagactactgctttgtcaaaganagttactngtcaagtcagtgttgatggcctcaatggctaaggcacccaatgccaagcctgatgatttgagtttgattctcagcatccacattgnagaagagaaacaatttccacaagttgncctctgacctccataagcatgaaggcagatataacccctcctctataaagaagtgaacttaaagagagagctgttacttatattttgtaagacaggaaattcttttggtcttttctacatttattttacctcaacaagctgtgaagncttttttttttaattcatcaataaanctgtggaaaacaaaaataa

SEQ ID NO: 1459 - DNA, 388 bp, Homo sapiens
  misc_feature (1)...(388): n = A,T,C or G
tttggaagcccagccttccntccatgttggtcagangagcttccgatggattacnttctgtacanttgnacatctanctgcacttcccagtgttactgtaggagcagtttgtaaatcaaaaccagatgaaggtttgatnanttnattttttaaattatccaacttttttctcccccaagtaaaagtattattcangaataagaanaattggtacatgtgtggcatgaaatgaagctctgatctgcttattagttatgtctttttactatatatntgtgccttacctcagtctntctagttacaanagatttgggaagaattaaatgattggnatgccttaggngtgnaaaacactaccctgtatcaatagctgttctccattcaacag

SEQ ID NO: 1460 - DNA, 386 bp, Homo sapiens
  misc_feature (1)...(386): n = A,T,C or G
gactgagctcgccatgtgaagtataattggcaagcctccatggctctcactgnagtactgtgaagtcagcatcacctagggagccgaggggagcacagctggccactggagctgccctggcgcctctgccccgggagcagctgattatntnaaaaantttcttgtccatncnncactttngtannggnggnanctnctgnttccngncctctttgattaaatttntatnatgaatgnatcntntnaganntgaaccctngangacnggggccgaaggnggagtgncagaggcggaaaatgaagtngaatgantgnanatacggcccacatcctanactcctatcaattccanaggaaaggaacaaggaagccacatcatataaact

SEQ ID NO: 1461 - DNA, 385 bp, Homo sapiens
  misc_feature (1)...(385): n = A,T,C or G
gacttgagataggaggctttgcnttggccgtcctctgaggccctaccagcacctgactgagnnagttgcaattacacntcacccacttggacctgaaacntggggaccaatctgcggacttaaggganggacntgaaagacctgaagcaggaggtaagcacantaggangaccagcctgtgtcaacctaacccggacacccttggaggtcccagaganntgagtcatcaaccagacagcatacacagcatggtgtgatagtaaaatntatagaatatgtatatatcttntgaagcgaaatagaatttgtatattataatttaactgaaccagaaattaataaaattaaatttcttccccggtgcagttatttacaagaaaaaaaa

SEQ ID NO: 1462 - DNA, 380 bp, Homo sapiens
  misc_feature (1)...(380): n = A,T,C or G
gactgaggatgacagcgatgggatcccgaggctcaggaagagagagttgtacnanaagtncngaantntgnnnctaaaggaatncaagaatgccctggatanngnnntatnnnganngccttgcctganagccngnatcgcgggcccaggggcttnattggtantagcccaggctaaggnanctatgaccagcctcagagnagtnatcagaacngccacnangaaagangacgangtttgnatagttccttccatcccattctttccctcttcattttaaagaaaggactctggggtttttactctgttacctgttcaatgacagagccttctaaggacattccaagacagtaaagatcctaaactcggaaaaaaaaaaa

SEQ ID NO: 1463 - DNA, 377 bp, Homo sapiens
  misc_feature (1)...(377): n = A,T,C or G
aaccatattaatctactcancatctncttcaccacagcctcccttccccaacatcacattancctttaggngtnancgactgaaaaaanccctancatgncnntnaanntcatctcnattatcantagaatgccccncaantcatccctnctgaaaaaccttctggntctnccctnattaaggatagaccattactatgttctatncctatagaaacntgcaaaaccttncgggggggacncatctnctataggagagtcccaggcaaanaaacccntatctcacatnccattcttccttcatataattacctnnnaaaatctcttggaaccnannaccatttcnatcatttccacaccccccctaaaataaaaacc

SEQ ID NO: 1464 - DNA, 376 bp, Homo sapiens
  misc_feature (1)...(376): n = A,T,C or G
gactgagccggcgatcggatgcanatattctgaaacccccaagcgtgggaccctgntttgggatcagcaccttgagctcctgccatggaaccctaanactcggaccttgaacctcaatatctggggctggaatccctgacatncgtctctgggaccccaagatttggaagccgaaccccattattttggagcatggatcccaatatttggacctgggaccccaagatttggcgtccaagcccccaaaattggagctgaactctgaattgtctgactgatacgttgacatctgggagcgaattcccaaatctatacctgggaccccactattctgggaaataaaccctgggatgcaggccttcaattccaaaaaaaa

SEQ ID NO: 1465 - DNA, 375 bp, Homo sapiens
  misc_feature (1)...(375): n = A,T,C or G
gacttgagtgagtatccagttgcagtaccntgaaggccagtggcacccctaggtngatggtgacagagtggntgtgcatccctcatgtggaagaaagttnttgttctntacagctcccaagtcctccaacccttaccccacggaaacctgttccttcaggaaacccacacacagtaggccagcancaggagtctccatgactactccaacctaacccacctcatttcctcacatgaaaacgaaaggcagggctgagagccctgatctgcggaggcttgtgttcaggctcgtccggatggaatattaaccacacccactagcacaatataccagctttaaagtgttttccgaaagaattcacgtaaaagaaaaaaa

SEQ ID NO: 1466 - DNA, 374 bp, Homo sapiens
  misc_feature (1)...(374): n = A,T,C or G
gatggcagtgacctaaaatcctcaggcaagcccggggtcatggcccagaagcacccgggagatngaaggttgtgtgnagcccaccgcagtggtggtacctccctcagtacatcaggatcctctgtggaccccgaaatactttcattctcaggactcagggactcagcagagactgctcctaatggtacacgatgcctcaaagagcactccggccctaagtacacacagcctccaaatccagcccactggncanatccaagccatggtcctccaaggggtccangaccacctanaggaggaggctaccctgannaaagcaagacagnttcagaaagaatcaggagtggaccangaactntttaagaaaaaataaa

SEQ ID NO: 1467 - DNA, 372 bp, Homo sapiens
  misc_feature (1)...(372): n = A,T,C or G
cacacttcctgctacagaactgtaagccctgcccacaaacaagcaancaagcaagcaagcaagcaagcaagcnnacaaacaaaccttctttctataagnnacctggtcttgaggtttcatcacagaaatggaaaaaataatatccaacgtgcnacaatatcccttggttattatcatagaaaaatccttatttataggccatcaagataacattgttctgcangtaaggacacctactgccaaatcccaanacttgagttcaagcccccagacataagcactcttacaggttgacctctgacctccatatccatgcacacatgtgaacaaacacnaaacacataaattaaagtagatttttaaaaaaaaaaa

SEQ ID NO: 1468 - DNA, 371 bp, Homo sapiens
  misc_feature (1)...(371): n = A,T,C or G
gccattcatgtcacctgggaaatggatcaaagangtacacatattatctgttgatgtcaaaatccaatgaggaagtcacnntttcattgactgtgttcaagatgtctaacacaagtgaagcaatattgnaccatactttttctcaatgtcccctncctgagatggaatgcccacagcaggacactacagcacataagaagcnttgctccaagagcttgtttccanaantttccatngcttatnnatcttgctgatgtcttagcagccatacttctttgcattggatcattnttgatgaagnattggacaacctgggttcccaatctgcaagtgtttactaggaagaatagngttttctagaatatcaggta

SEQ ID NO: 1469 - DNA, 368 bp, Homo sapiens
  misc_feature (1)...(368): n = A,T,C or G
gaactgaggtcccttctggaatgttctcagaactcaaggtaaaaantcccagtgagtcanggtcnntgaagganggtttgaaantntcctgtgcnngtgccntcatgaggcctgccctgcagcanggatggcaggnaccttcagctctacttntgcggtacaaccttggctgtgcagcctgcagccagaacctggnccataaaggcatctatctggnaacccccttgcttggggtctccatcaccttatgcttctccctgggctgctggcccctgtagggactttgtctactccctttgtganaacctcatggccacagagccactggacactgttcttcactgtataataaagattggatagcaatt

SEQ ID NO: 1470 - DNA, 365 bp, Homo sapiens
gactgaggtggggtctttaccctttgagatcaactgaggcctgaagagataggtggctcgatagcttcaaatgcgatgtctcccacaactctccgtgcgccaccacgcccagcatctctccagcatttgaacagtcggtccccagttggtggctgtgggcagaggattaggagttttcaattccagggaaccccgccctctctggcctcccgggaacctccatgtggaccgggcacttgaactccaggcaagacatcaatcaaaataataagtaataaatctaaccttcttttcaggactccatgggcatgcagtacacatctgtacattgccggcaaacactcacacacagaaaacaaaaacaa

SEQ ID NO: 1471 - DNA, 362 bp, Homo sapiens
  misc_feature (1)...(362): n = A,T,C or G
gattgaggagccgttcntttcngctangcagctcacccatgccctgnctgncaccaccctggtnacatgctnaccacgcttgaccattggagcncttgctgctagtacctgagccacatgggccctgttaaaggtganatntngatgcggntggngnaagaaaaggcccctgctngagagctggagctgggcacatnctgtggatactntacactgcttattgngcgagccttgcnccntggaagncgnnttctcantgaggagcgngactaangtacagcngcagtgnctgaaanagtcatnnggntggnaggctttcnatgagnaaatggtggagctaattgcaggcagctcagaggaag

SEQ ID NO: 1472 - DNA, 362 bp, Homo sapiens
  misc_feature (1)...(362): n = A,T,C or G
ataaaaagcttgatgctggcctgaaananacattcggcttctacacgagctcgaatgntgnnctgtctgtcacttgctgactcctgcccatctgcacccagagacccagttccacacanacangggacccagagggtctgcagcacctctcctggctggttttcccctactaatacttgtaatnatctggngttnaacatgtntctttatttcttatctaggatgntaactccncaaagacatctttggctattnttcgnatgtgtatttatttctgtattttcaacatcacagcaatgcccancacatggnacattctnaacnaacatattttgaatgaataaatgaatggaaatactcac

SEQ ID NO: 1473 - DNA, 362 bp, Homo sapiens
  misc_feature (1)...(362): n = A,T,C or G
gaactgagattctcatattctggttttctgtggaggtccttgatccacctggacttgagctcaagcangtgaaagatntgtatnacaagancttcacntctctgaanaaagaaattgaagannacctnanaagatggaaagatntcccatgctcatggatcggcaggattancatagtaaaaatagccatcttacctaangcaatcgtacagattcngtgcaatccccatcaaaattctaactcacttcttcacagatatagaaagagcaattctcatatttatctggancaacancaactgcaaanactcaggatatcaaaaaatcnttctcaacaataaaaganctgggtgaatcaccat

SEQ ID NO: 1474 - DNA, 362 bp, Homo sapiens
  misc_feature (1)...(362): n = A,T,C or G
gacttgaggcgtctgtccttcggcngttggaaccccctannttccaccntgacctgggcttactgaagaggacgtntgaccagctggangaggactgactccagcntcctcctcggcctccctcctcccntccttcgttcgctcaacctcttttgttcagtacagtgtaacattgaagctaatttgtactacctggatatctgactggagccgcaggtacagatctgtattgttcttactgaaacacagcatggaattaacattaaacttaaataaaacaaacctaaattaaaaatgccaaatatatcatgcctccatcctttatacttctaaaataaaatctctagtccagaaaaaaaaaa

SEQ ID NO: 1475 - DNA, 361 bp, Homo sapiens
  misc_feature (1)...(361): n = A,T,C or G
cgtgaggttatgaacatcacaaganaacctgaanactcaaccttacctgggcccacangggcncacaagagacctgaagcaccaanacanagagcatgcacgggnncagacctatgccccntacanatntgtaacagcacatgcaagctnggtcttnatgnaaatcccctgacagcaggaacaggagctgnctctgactcagccatctgccttngggtacttttcccntaactgccttgtctagcctcaatagaagatgcacctnggncctactgcaccttgangatangccagaggnaaggntannantccatgggangnctccntttctntgaagaaaaagagggggtatggggagggg

SEQ ID NO: 1476 - DNA, 361 bp, Homo sapiens
  misc_feature (1)...(361): n = A,T,C or G
gaacttgagatacacgcagtgtcctcaggcctgcaggaggtggccccatcccctggaaccagagttacagcgggttttgagacntccntgcctggacnttgaactcaggttctctgcaaaaatagtcagngctttaccactgagccatctntacaaccctgccctatgctttngattatatatattttaaaatattcgctatntatttatatgangaccttgtaacngncnnnnnacctctcanaccaggnnnnngtnaccattacaaatactggaaanntancctntgctttaagagaactgaacaatanacctattaacgggtgaaccatctcctccagncccttgactataattttta

SEQ ID NO: 1477 - DNA, 360 bp, Homo sapiens
  misc_feature (1)...(360): n = A,T,C or G
aacaataaaattctgagccttgntcagagaaacaattctggaancantgancancgattctactaaaggggcttgtnacgccaaggaaggacacacatgcacttgncctcaggatngcctggggaccctggtganatcagcgggnattcggtacaaattgtggaggngngaggtgntcatcgatggacccctagccctcacagatggaatccctttcttctgctccaccaatggtgagattctgacttcagggnaatgctgaagggcttcctgcttcccaagtacttcaaggaggccctgaaactttcaanctacanaaaannctgtctcctttgcntggtgataaaaagacataaactc

SEQ ID NO: 1478 - DNA, 359 bp, Homo sapiens
  misc_feature (1)...(359): n = A,T,C or G
ttcaaactgctggatcccctgtntatgttgaatnatgcctggtggtcttacagnatcactggcacactancgctcggactgtgtgattgagcccaagaagccagagactatgcatttggccgctgccaagggggggattgctcacttcacgtgcagtttgtccagttactcagccctttttatttccttgtttgagaggtatgcaaccttgcctttacccaaactttgtggtttaccccttcacctcccaggggcccagactcttaggggggnagggtgtggcttaactgcagcgttggaaccttaaagtgggaaagatagggtcaagttaaagtaataaaatgagtcatgtctcccga

SEQ ID NO: 1479 - DNA, 358 bp, Homo sapiens
  misc_feature (1)...(358): n = A,T,C or G
tgggcatggttgtttcnaggagnccgggnacgcagtttggagnnnanttggccgncgaagcttacatgggatntcgcaaatccgtgggaagaagccccattttcttcatctcngtggcttcctcctactggtctcctgaangcagtgaccctctgcccccaanacttaacaagggtcttgctagcttcccttaanggcactggttntgctttttggttcctccttcctgggttccactgaatcccttcncttaaaaanccccgggttttntttttnaaacccccccattnaagggcttggaaatgggggtttnaaccgggccaantttcccgggcccttaaaaaaggggcctttttcc

SEQ ID NO: 1480 - DNA, 483 bp, Homo sapiens
  misc_feature (1)...(483): n = A,T,C or G
gactgagccgaagaagcaggcatcgganaaccccgaaccaggcaggaccaagccgctgggcatgtgactcaaggtcagnggnccanatcnantttgnnactnaaannggagangangganatgggagcacntcaggtgggctctaccttgaaaagacatncttagcgccaggncctanggcacaagttcangagacctgaaggagttgccaatatnaaagntggcctctgtagacacagacagcgttttcttataccatcctggttcaggtcatgcctancccggggatgaggccagtgggtgacgctcccacagggtgccctgtggcctgtcaatcacatcaccaatgcacttgtcattcgaacttccttctctgcagtcttcacaccttattaggattttcttctcaggaactnaattgttgtgttcaggagaagtagctttctgcagctgtgggtcacaaatacgctttaaaaaaaaaaa

SEQ ID NO: 1481 - DNA, 356 bp, Homo sapiens
  misc_feature (1)...(356): n = A,T,C or G
agactgagggaaccgngatgaggctacctggttgatttgtttgtaaagctttctgctgcttctccacatcctacctctggtcttcaccaaggacactatcatcaggaaccgtatgngaaggnggaagccaattnctcagcgaagatganccggccatangactcgntggagccaaaagtaatggacngangacatgctcaaagcanctgtcggggagcaagggccccaggaagaagctgggcagctagccaagcaggagggcatcctcttcaaagatgtcctgtccctgcagctggacttccagangggtcancgcanaccaangnnanagcccaccanacacaggaccaggggca

SEQ ID NO: 1482 - DNA, 355 bp, Homo sapiens
  misc_feature (1)...(355): n = A,T,C or G
tgaacagacgtaggcntagacgaggagggaaggccgacagagagtngccagaggacttctgtgctagaagcaganaggcagtcncagcnccacttgacgcttanaggaaatggcttttagaaagtcaaagagcagatccagatcgactcacaggcatccgaccccagaggactctcaggcttgtgaatcacaggacctggaaagaggacacaggaaaggaagcaggacctttcctgttgtctctgccatggaagagctgacagcacgctacgaatggtcaggaaccttctccatccctagtcctctaacccaaagctgggcgaagtttttaaaatgctttctaaaaactgtctga

SEQ ID NO: 1483 - DNA, 355 bp, Homo sapiens
  misc_feature (1)...(355): n = A,T,C or G
gactgagaccttagagcaagtctctaatgcttgaagacaaggcaagagaattcgtaagtctttcaatataaagttcaagaagaaacaagcctaacctatggtaaagaagatgcaaatatagcttgtctatatggtgaattgtgttgatggattttcatatatggaaccatccctgcatccctgggatgaagcctacttgatcatggtgaaagatggttttgatgtgttcttggattcggtttgctaggattttattagggagttttgcatcaatattcataagcaaaatnggtctgaagctctctttctttgttgggtctttgtgtggtttaggtatcagagtaaatgtggcttc

SEQ ID NO: 1484 - DNA, 352 bp, Homo sapiens
  misc_feature (1)...(352): n = A,T,C or G
atcgacttttgggagaagtcnncccacccacactgnctctgctggggaatggagcgagggctagccaggctcttcagatgnccgttgatggacaccaggcccgcnctcggatcttggctcccttgaggatgacgccttggttgtctgcntgttgcncncnancgccccccganggagngcctgtagcacctganagcaccgctggcccntgccctctgganccttgactgtganntgcnaganactctggccnccctgctggtgaaaganctcctnttttagtctccantttggtacttgttttcctaactaagtgacaaattgcctgcctctaataaactaggtcagttaa

SEQ ID NO: 1485 - DNA, 350 bp, Homo sapiens
  misc_feature (1)...(350): n = A,T,C or G
gctttcggcatgatgacccagctngaagnnaactnggcaatggcancagcctaacacttgtatnnttanntgggggnntgcaccgctaccatttcaccatggccttgnaacagtnccacggcctatggccagnaccatngctgngggggnggatgcngcttanatcacaaaganggcccnaaatagcccanaatagcatncccaccacacaagttacatactgtgattagggccccagccagngagcagtatntggtnttntangaaagggagattgaagggcaggagaaatggctnangngaacagcanangctgtcccttccagaggacctgggctcagttccccagc

SEQ ID NO: 1486 - DNA, 349 bp, Homo sapiens
gactgaggttctgcatctcgaaggctcccaggtgatgctgatgctgctgaagcaggacgctgagcagcctgagctggcaagccatatacagatccaacttcgcaagagagaatacaccagtaaacaggagtaaattggcatgaccaagaagaaccaagctgatgcctacaaacgacctcaccaaagaggcactggtgtccctgctctgaagagcccctaagaccgagcaggatggcagggtgtattggggctcaggggagtgtggctccaacaggaaccacaggcattcattaccaccacctgccagggagagtaaagaaaatcggactgggagagtgaaaaaaaaaaa

SEQ ID NO: 1487 - DNA, 463 bp, Homo sapiens
  misc_feature (1)...(463): n = A,T,C or G
gactgagggcgtgagncacctcttacataagggtggtgtcccctgctgatnacccccaccnnggccagtncantatgacagaaagaaccagcngtgganacacaccanaagagggcatnggatcccattgcatgatggntatgatgccaccatgaggttgttgctaccttgaactcangacctctggaagagcagccagtgctcttaaccgctgagccatctctccatccctacccatcatgcctatnatgtatattacaatattgcaacccanctctacttcataanaacagcagcaaagacaaaaaccaaaaggacaacaagggaatctggatgagagctgtacaccaacgaattanatagcttgcctgccaaggtggcacagaaaaatnccaggaatctcatacactgttaaacagactcaagatanagccacaataaacaaagagataaaatcatgcca

SEQ ID NO: 1488 - DNA, 348 bp, Homo sapiens
  misc_feature (1)...(348): n = A,T,C or G
acttgtgctaccgcacgcnctgccgcgangtggcagcncangacntcaggcgcntcttttntctctctgcggggangcnacnngaagcttctccncggtcccatggtncctaacccctcaaaactggnggagaatggctnttcntactgccgacaatgccttgtacttttggagacccattatggaagangtnaatcaaagctnncgatgncattnnacacagganactcactngcccgncctttattttaatgagncaacactgncatttttttgctntactgcatgnaagcngtanccatgagtaccttgttttaaggtncacatctacaaccttaaaacaaaggt

SEQ ID NO: 1489 - DNA, 347 bp, Homo sapiens
  misc_feature (1)...(347): n = A,T,C or G
gactgaggtaccctctgtggccggaaaggatgtcggagcctctgatgctggagttacaggtggtgtgagtcacctgacaagggagctggganccnacctctggtcttctgcaagatcagtgagtgagtccaananctgaactatntctncaaccctgaatcattancactnttccagaataangtaatntgatgctattgncactgnccttnaantcnatcactgnttaggnataggcncnnnagatttntgnctnacaggccagactgatctacanngggnnctccaggacagtttgaggacagacanggctatacagtgnatcccctgncttgaccccctgagct

SEQ ID NO: 1490 - DNA, 345 bp, Homo sapiens
  misc_feature (1)...(345): n = A,T,C or G
tctgatccactgttggatatagcacagaaggtgtacaaggagaantgtntgtctgtgtgtccagcatcctgcaaaggcccaagcnccgcngnaaagcaaagagctccaggcaccccagtttcatttnatttcctccaaagcccctgggaantctgagctcctgnggntgctggtgagcanaatcnnactgggaaaagccatgccaggggctcagcctagggatgtgatcgttgtgccaagatctccagattcgngttttggttcttatgaaacacgctntgacctggntgntgtgatgttactcacatctaaatgctnatngaacaactgaactatttgcaaaaa

SEQ ID NO: 1491 - DNA, 345 bp, Homo sapiens
  misc_feature (1)...(345): n = A,T,C or G
gtcacacagctcaccaggaangcganctgaggactgaacttccggtagtttaagcgggacacagagggagctgggcccnttccagggagttntgagtgaangananggaagcangcaaggctctgtccatgaagacatttcagatggagcaataaaaaccaagaagagcttccagaaacttctactaattaaggggtcaccaatgctcttaggaggtntagggacttcctgaagctgttnanagnngtttacttanggancnngactgcannatgaactgttcnanncnnagaggancttttnnagaaaccnggttagactactttggccttgaactcctacagg

SEQ ID NO: 1492 - DNA, 340 bp, Homo sapiens
  misc_feature (1)...(340): n = A,T,C or G
ggtaatccttcgcctgcagcgcagtacnaatctgaggtcgactgggattgacnttctctgataattaaaaagccactggnaagaacacaaagatgggcttccagggtgcttgaggntgnaccacagcgnctccngnctatgacgtcacctggncgtatgacatcaccatggagattcggacagacgaagcttcacagatgccccagaaatgaccattatccacagactgcagagactctgcagtatccatgtgaagacgtttcaaaacatcaccgtggagtctaggcctgccatttatggatcctgaaccaggggtacagaaaccaggactagtgacctg

SEQ ID NO: 1493 - DNA, 508 bp, Homo sapiens
  misc_feature (1)...(508): n = A,T,C or G
cgtcagctcaaggcantgctttctngtatgaaggctgacgngcncatnganagcaccttgaaancngccnctgtgcannancatnntngnccatnaatnantatgcaggccttagttacacccgtgnnnntnacttannaganaggatcctgcnaanacacatgngctncnngatgncatcataaggcaaggggagtccccgaagagagtctgggagaacctactgctggtgattggcgatacagtctcagatgcagggatgaccccaggatactgaagatgacaggactgtgagatgctcaccaaggatagaggccgggtggggcagagcagagctgaatctcaagacagctgcatgtgctatagagggcaggacagagatgtggagctgcccaagctctctggagcttggaagatgatgactgagtcccagtcgctgttcactgaactatttatacctttgcattttggttttgctttaatctcattgtaactgtgcccaaaccat

SEQ ID NO: 1494 - DNA, 338 bp, Homo sapiens
  misc_feature (1)...(338): n = A,T,C or G
gactgagggatggtgagattgttctaactactgtcgtggctaacctgtgaatattctaaacgccatgggactccatccaaggacatgagttacgcctgagcccggcctgacaccccaaggctgtcaaggaggatctatgttccgcatagatctataagatgcagagngcccgccgcctggagcctgacttcggacctnatgtgagcagatgcccacttttttgttctttgttaaaattccccctngacccctncccattccctgcaatgtatgctataaaacaaggcacctcancataataaacggagaccttgataggtacaatctaaaaaaaaaaa

SEQ ID NO: 1495 - DNA, 336 bp, Homo sapiens
  misc_feature (1)...(336): n = A,T,C or G
cgttaatccacgccctgctgcagnctctgtggtacagcctgagaaccctgtcccggntgcccaggacaccactgacaagaagcccaccaggccagcagcancatctcaggacatcacaagccggngtgactggagcagagcagagcctgtttggctcacnnaagaggaaagaggaccccgcnnacnctgaagtcaaccagaggaacctncagtttgtgggantcantggngggtatgagtncccctcggnggnctagngcagagnagaggctaggancncgagagcttngcnnnatgagggcccggngccntccncctggggctctgtgcccatct

SEQ ID NO: 1496 - DNA, 336 bp, Homo sapiens
  misc_feature (1)...(336): n = A,T,C or G
acgtcctcatggattcagccctggagctatgaagacatgagaaagcagctgcttggaactgccaggctctgctggggngntgatggtcccggggggaatgtgaatctgnctgcctgcccgntgcgcccgccccgttctccccccgatntcagnatttgtcccncacggcccaggccctgtgcaggngcctnttccnntgcctggaanncntganccggcacaacaggccntgtcaatttccccgaaccncgggaggtgtcaagtttggcaggtcacccangcntggtggcttggggaaaggtcntacacacantgcntttgcaattttgccctgca

SEQ ID NO: 1497 - DNA, 336 bp, Homo sapiens
  misc_feature (1)...(336): n = A,T,C or G
gggctgagcatatacctgganatccttggtggcgactgacngacagacangcngattggntgttaggcangaccactncntntccttgtgctggttctcctccaaactgctactttaactgcacctgcaatgaaaanggtcccacnccagagaaccagcatgcctgctagtgagccgctttattntgctattacaacttgggcngataagacgattttaagccangtggngncgnnntatgtctttgattctancactcangaggcagaggcnggtggcntttatgagtntaaaggccagcctgntctatagagtgagttccaggacagtcctgtg

SEQ ID NO: 1498 - DNA, 336 bp, Homo sapiens
  misc_feature (1)...(336): n = A,T,C or G
gccccgagacgcgcaacttcntgcgcctcctgttgacgtggacgcnaccaggtcaagggcctccaaggccttggaaccatgggctactggcaaagctgtatccacatatgggccatgctcaagatgggtggcagagctcaactccagagtccaaaacaagtgatcagtgtgtgtaaagactagcagctgcagcttcctctgagaagtttgcagccccaaactattggtctacagagacctcctactaagactagttaaaccttgtcactgtgctatgcccagtgaacacctcaaagttcccagctatcgtggggatctaaccccagcttttgctgt

SEQ ID NO: 1499 - DNA, 333 bp, Homo sapiens
  misc_feature (1)...(333): n = A,T,C or G
gactgagaaagagcatcatataccctggtagangagttacaganggttctaagctccgatgtgggtttgaganttgaatgtgggtcctctggaagagagtgctgctctcccacaccctgtctttgtttcttgagcaccgtggtgaaagtagctctgcttctccccctcaaggaaagcaagcataggaactaggttccagctatgagaatccaaccaatcttgaatggcagctattcagagaacaaaaacttgcatctgtaccagacgtgtgcagagttccttccctggtcattgtttccccaaacagtaaaagtatttacataataaaaaaaa

SEQ ID NO: 1500 - DNA, 333 bp, Homo sapiens
  misc_feature (1)...(333): n = A,T,C or G
gactgagtacatgaaccacagnagcatggtagagcaatggcttcatgggaacccaccangagngctcctgattcagtgctgctaacctcccaggattcagtcccattgcgggcgggcctcgtgctaagcgatctcaacactgacgttacacacgaggaaggagacaaagagtgtggatgttcaccgtccaagtctcaaaagccagaggctatggctgtcttctataatcccagcagcacagccctgntgtatcactgggaaattatgtgcctggtgnctcccttcaaataaagttttattgaaaccacanaaaaccaaaataaaatagtttgg

SEQ ID NO: 1501 - DNA, 333 bp, Homo sapiens
  misc_feature (1)...(333): n = A,T,C or G
atctgggcactggtgcccaacgngtggcttgagtaccaaggctacagacgaagaacactgcagtgtttctgttcggccgattttgngtggaanatgccctgcgtgngagcctgccgcctcaactagagatcctggcacattgatagctgtcttcagacactccanaanagggtgtcagatcttgttacngatggttncnagccaccatgtgngtgctgggattngaactctgnaccttcggangagcanccgggcgctntaacccactgngccatntnaccannccggaatgntttanggatggngcatacatnattttatgaaagcttgttc

SEQ ID NO: 1502 - DNA, 332 bp, Homo sapiens
  misc_feature (1)...(332): n = A,T,C or G
tgcggctgctttctgttctntcnatnngacacncccantgttggaaccngnacgagccncacacggtgtcacctttttacttggaccagaagattattctggaagggaatcggntccnctnncccttccttcataacatggagncancaactnataaaatttgagcnttgatcaggagatgaaaaaatggaaanacaangggggggcaagaagtacactagatttgggctgnagcanggtcacaggacagtatagcaccttgactttcctttttctttnctgancttttcatcnctgtanaaacgcagaatccctggagtggagaaaaaaaa

SEQ ID NO: 1503 - DNA, 331 bp, Homo sapiens
  misc_feature (1)...(331): n = A,T,C or G
gaactgagtatattggattttctaaaagaatggaatcaagtgatggctttttctccagaatttgaatatggaggcttcaggaacagatgaagttgacaagctaaaaactaaatttntntctgcttggaacaatatgaaatatagttgggtgtggaaaacaaagacatattttagtagaaattcacctgttttattgcttggaaaatgttatcattttaaatatgaaggtaagcattaaaaaaaaatctttgaagactttcattgctaaacattttgttattttatttccatattaaaccgccttgacacgttaaccacctaaaaaaaaaaa

SEQ ID NO: 1504 - DNA, 331 bp, Homo sapiens
  misc_feature (1)...(331): n = A,T,C or G
tccgccttcacttctntannatggttgacataacctacttaagctcaggnctannatctatatagctcaaagatgcagtatgccttgccaagcatcctgcagcgaggggccacagcctgggtttggagacagcaaagtgtggctgggccaagtggaagggtgagggccttcccctggaacctcgccaccaggttcacgtggagcctgacagctcccangggcagccacgtgctcttcccatgacatnataccgcctcggaactttgaggccaaggattcttggaatgcttgattcatcctggaacaaaaataatactgcgtatttataaaa

SEQ ID NO: 1505 - DNA, 330 bp, Homo sapiens
  misc_feature (1)...(330): n = A,T,C or G
tgccgatgtctagtctgccncgcacggctcctgcanaggccnnggccncggggannncncannagacgtcggcgcncgctnctggttgtaaaccaanngngggannnccacaagacacctgagangccaggacagactcgtaggaaggtaccaattcctcctattccagagtatctgcccccagtgaacctgattcaccgagatgttttgcgggcatggtgccagaagaaacgagtgancancaaaggccanaaattanatgcttataaacnactccttgcaagggctttcccanaacaaatgntgnagttgaggaacgtccctgactcg

SEQ ID NO: 1506 - DNA, 329 bp, Homo sapiens
  misc_feature (1)...(329): n = A,T,C or G
agcagacacatgatgangaataaaagggccttggaggaaaggcaccagtcactcgcctgtggaaggcgatacacacagngtcctgagaccgtccatggngttttgatgncanctctacacctgttagccacaggcaggntgttgatggggctgnacngtgttngnnacattgtgcancattacgggacacaccactttcgaggctcgcctggtgtggtgcatttggtggccttccatccagaccccacccgcctgctgctcttctcctcatctgnggacacctctatccncgtgtggtcactgcaagaccgctcgtgtttggctgtcct

SEQ ID NO: 1507 - DNA, 328 bp, Homo sapiens
  misc_feature (1)...(328): n = A,T,C or G
actgagagaaacaataaggggttacatgnngtttaaggntataaggacccttactgttccctcacancaggattcccaggggaagctgaganggtngataacagaaattcaggaacctgtttgggcctgggctattagagtggaagatgggagccntcctganaacatgacttaggngcccacagacctggcgtcgggantgcngttgactgaagagngantttagaagagacctganaggcnnagcgctgatattcttctatnagggacatgaacttttcgtcgncggcatcgncatnggnancatcatcaccatcaccagcagcag

SEQ ID NO: 1508 - DNA, 326 bp, Homo sapiens
  misc_feature (1)...(326): n = A,T,C or G
ggtggttgaatagganaagtaccttttgccaccccattnggangacttgaacccagggtgttgctacactatgcctgngaggannggctcggtctagcatgaaacacnnagccncctggggcctctggcnncggcngtgangntgganatcntcnnggngcatgagccgagctttggcnnaaactgggctgntgcgtggttcgagaagccccagcccgatgaaaangagaagacggnttgnccccccctatnattggngagccaatganctttgtncacctgactcacatcntnctctggagagatgggggcctgtagatggactt

SEQ ID NO: 1509 - DNA, 326 bp, Homo sapiens
  misc_feature (1)...(326): n = A,T,C or G
gggcagctgggtaacctttgatgatgaccctgcttttnaatcttctcagaaaagaaagganttnnctctggagactcatggtgtnagaatcaccantcngactgantcatganccttcctaccctccganancctcccatcaccccctcctctnccancancncccccctntcctctcccatnaagactttttatttcaatccaaaacccccanacaactcccctctttctncacccaccaaaacttcccanaattccctnacatccctaaaacaaaaacacatatactttatcctattccaaaatagttcttcaaacaaatgccc

SEQ ID NO: 1510 - DNA, 325 bp, Homo sapiens
  misc_feature (1)...(325): n = A,T,C or G
tgtactaggaggacgangagcctgtganaannccgcntnttccctntnacangtccancctctncctgntgnganctggaaaggnagangaancccctgttgtagcacgangncccattctcctctancgaanatgttaaagcctgcattctgcatgaagactgtcattggaggtagaaggttttaagganggaagnaaaanttcnaagacatccacttgnccctttccgttgagccagcacacacagcantgccaggagcagtcgtgtggnctcccanttgctgnctgngtgtattccagttgctancgggaggctctgaacaa

SEQ ID NO: 1511 - DNA, 325 bp, Homo sapiens
  misc_feature (1)...(325): n = A,T,C or G
cagactgagggaagctgtcttggaaaatgagcaacagcaacactgnggtgcttctgccncacacacgtggngnggngctgcccactgaaggccaggnttggactcaggactcntgnaggattaatgagagtgatgataatggagctgacncccagagngtanctntctgggcacntaagnangagtaattangtanaaacttttttgtctatgnggcatgcgagtggngtnggagccncaccttgagtantgccaaggggngtcacaccannnatgtcctgttatctggngtgccatcaatggctccccaggagcgaggcgtttg

SEQ ID NO: 1512 - DNA, 325 bp, Homo sapiens
  misc_feature (1)...(325): n = A,T,C or G
gactgaggatcgttgatactggtcagctggngctgagaatgagccttcattaaaaagacatcagcaccgactggntngccattggctcccacctgactcgactgnangagtacntnggaaagacacccaatggatgatncngcacgtcagcactgncccacatctgnctacactgggcttaccgntggnatntgcagtccccangagangcccctacnnncnaagcacctgactgngtatncaagactcaaagaaacatcttagnntatatnccctccccntgggaccttncaaggnaaggngggcatgtcacattgaaaccaca

SEQ ID NO: 1513 - DNA, 321 bp, Homo sapiens
  misc_feature (1)...(321): n = A,T,C or G
gactgaggtggggtctttccaaggagggccgcctggcnctgcnactcttcaagccnnactgggagcagaggagacaccaggaacactcnngagaataaattnacattcttattcaagagcccctatcatgtgccagaaatcttacagaacacaagagtcagggataaagagcaggacccactgtgtgattaaacatgaccattttctgcttttcactgccccaccctgtaggaatactatctacccctggactactgaactcgagagtggctatttgcctgtgctggctaataaaatgtagacagagttgaaaaaaaaaaa

SEQ ID NO: 1514 - DNA, 319 bp, Homo sapiens
  misc_feature (1)...(319): n = A,T,C or G
actgagaattaagggagctggggaaaaaattggaggatttcacaccagctgccagcagcatttgatgccaaggacaaatnttcacagcgctgtctcctccggggatatatactagccatttccaggtaaaagcaaggattcccgcctagaagggaggcctgcctgtacctggcctgccttccagggggacatttcttttccaatagagtctccacacagtaagaggattatttntatgcatcgcgaagccccttagggtctgcaagagttccgagtcacccacaaaagnttaaatcacatttaacccagaaaaaaaaaa

SEQ ID NO: 1515 - DNA, 318 bp, Homo sapiens
  misc_feature (1)...(318): n = A,T,C or G
gagtggaggtgtctgaggagcnagcttcctcggaagatctnganganatctngtcttcncttctggaagctgcaggcattccttccnggntccagaacntcaccccgggcgtcggcctccgttccacaatganannccactgtcatgtgtctncnntnnctcntcagacccccaccantgcncnaacttgcctntgtcttaattacnntaattactcaatgtttccntcntaaagctcccntccatgcctcctgggtttactttaaaattaattttaatttagaatttaaaaaaattaatttaatttaaaaaaaaaaa

SEQ ID NO: 1516 - DNA, 317 bp, Homo sapiens
  misc_feature (1)...(317): n = A,T,C or G
actgaggtctgtgaagagaatgggcacancaacaagnantctacctggattgnggtatganagcactgaganacactgctccattgccttgcttgctaccagggcttgnnctacactgnggacaaacagaggatacccacagagtnaaatgtnttatattaccttatgtcaaggaaacctacctcagtatctacctctnatggaccaaataaacttnatncanantntgcctcctatgaanacgacttccaccacaagtccagcactgatatattcccatctttttttaaaaaaaaattttttcgttatttgcattt

SEQ ID NO: 1517 - DNA, 317 bp, Homo sapiens
  misc_feature (1)...(317): n = A,T,C or G
gactgaggacctggtncgcagggtcttgcggggngaaattacggttcaaaatcgcaggaatccccaagcttatactagacctcacccatggaaccttctccaaattgctacccgtaaacctcacgtcacctagtctgaaagacaaatacaggatggaggagccccgtaaatgagtgaggaaggaagcaaagagccctttcaaaatgacacatcttctgagaaagcctgtcctgggcttacaccctgacccctttcagagccttcatgacagtgtcaaggactgtgtgtaataccaatattttatccaaaaaaaaaaa

SEQ ID NO: 1518 - DNA, 316 bp, Homo sapiens
  misc_feature (1)...(316): n = A,T,C or G
tccttcggtacgccaccnactgtctgcctgccttccagagcntctgcccctgcattctccaacagcatgaaatcagaatctggaatcgggantgggaagcaaggctcagggncctcgatttgctggccttggagacaggagaagactgcgttgtcaggatgtctgtaaaccacngagatggaggtctgcgggaggagtcanaacagacagttgcaanagctccaggganatgtgggcaaaatgcaaaaacttggagatgtgggtccagccccgccattctctgtgtanctctggctgncctggaactcactttgta

SEQ ID NO: 1519 - DNA, 316 bp, Homo sapiens
  misc_feature (1)...(316): n = A,T,C or G
caaaccactgattcctattactggatcccttttcctnccatcacagngcccgacgactcacacnctgnantttnagctgtntncacnatgagctctgaggatgacgacnacangacaggcacttgtagaggannaggacaaatgnctgggncantcgaggcagaagtgnactttcatcaacgngggngggatcaggctgatgatctggcngtccttcgaagaggtgcatgcnccangncttgggctgtggggaagccagggncagngtnngccctgntctgactcccttgccccaccctagctggacagccaccaa

SEQ ID NO: 1520 - DNA, 316 bp, Homo sapiens
gactgagctcctccccctcccacctcgctgactgaccctgttgtaggaccctccgtgactgcattgggcgtttcactctgtgcaagctggtttgctatccgcaggaccttagctaagtcacagctacagcatccctttgccggcgggctctgggagtgaggactcttgttcttagtctagggaccttgtaacattggacagacctagccacagtccctgtttgtaatccatcttgctgcctctggacaggtctccactccacccttacccttggcatctatatttctttgaaacaaatattatttaaaaaaaaaaa

SEQ ID NO: 1521 - DNA, 315 bp, Homo sapiens
  misc_feature (1)...(315): n = A,T,C or G
tccggaaggaggaccggngagnatccaatactgatggcgtcccaataagccacaagccttggaaccagagcanngactcacgtgcnatgaccatttgcaagtgaagatgcagtggacntgagggatagactgcaggacacaccatgacacactacagcgttccacggatgagatgtttttttatgctttggtttttgttttgctnngttttgncttttgtttgtttgtgtgtcctttattttgggtgagaggtttgaaagagccaggggtggatatgagggggcaggcagatgancgggattgggctgctcgatg

SEQ ID NO: 1522 - DNA, 314 bp, Homo sapiens
  misc_feature (1)...(314): n = A,T,C or G
tgagaagctgcttcctctgtganccagtaacttctgtgccctctantggctggtctcgcagcncttcatgccacccangtgcctctgcaagancttgntgacagtctgggtctgggagcagganangattcccttaatcctgcagagacttgatgccccagggtgaagagaatgaggggagagggcaccctctcantaggtgaagaggaggatggntggggnaaagaacannctatgggaccagaaggggagcaacatttgtgangttaataaatataataattattaataaaaaatctctagcaaaaaaaaaa

SEQ ID NO: 1523 - DNA, 314 bp, Homo sapiens
  misc_feature (1)...(314): n = A,T,C or G
gactgagggagacctgacagcagtcatggcaagcagcagcggggacagtgttacccgccggagtgtggcatcacagtttttcacacaagaagaagggccanncntcnatggcatgaccacttctgagagggtggtatgattnttctgaaccatngctgcnttgatcaccaaagactcnaanatcacagtgctcaaacagntccaanagcgtgntnattancaacgaccnnaccctnctngacaangtntatggatgaaatnattactttccanncacanaanntcnttgntntgancaagtttgtaattgtctt

SEQ ID NO: 1524 - DNA, 313 bp, Homo sapiens
  misc_feature (1)...(313): n = A,T,C or G
caagctggcaatgaanttacactatntagcacctgaatgacctctaactcgctgtgctcaaccttctgattgctngattnctggtaagagccaccatcccgctcacagangttgctaacactgaaaaagcctgctatctgaaatgtttaaantattttaattatttggncatgnntaagnggntaaggacctgggntcanttnccagtacccatatggcagctcacaactatccccagttccagggaatttgacacccccgcacggatgtgcatatgcaagcaaaacaccaatgcatatcaaataaaaataaa

SEQ ID NO: 1525 - DNA, 313 bp, Homo sapiens
aactgaggtggggtctttcagtgaccacccgtttggagatgagacgttccacgccagccccgcccctcgaccctggaggcggaggtcgttcccgacgtgctccgcgaagagtccaaagatggcggcggcggcggttgcagctcgccgcctgtcctttcgcagcgggcttgtcttgctgcagaccactcgggggacgggtgtgtgtgaaccgaaggtctgttgcagattttatgctggaactgaatccctcccaaaggttgaaggatcagatataacagggattgaagaaatagtcattccaaaaaagaaaaca

SEQ ID NO: 1526 - DNA, 311 bp, Homo sapiens
  misc_feature (1)...(311): n = A,T,C or G
cccatgaaggaacatgcnangacgagggagcngngggtatcgnagaatggccacnacgggcgttcnttgctcagagtgggctcaangttgtcactgaagccggnangggactggcatgctattgngcnaaaagcctnnggcaggatcannntgtnntcttcancntngnttctgccgagagagtatccatcatgggctgatgcaatgnggcggctgcntactgctttgatccggcctacctgcccattcnaccancaagcgaaacatcgcaatcgagcngagcacgtactcggatggaagcccggtcttgt

SEQ ID NO: 1527 - DNA, 311 bp, Homo sapiens
  misc_feature (1)...(311): n = A,T,C or G
cagaattctctgacctatgnctcgggatcctctactaatctcaagtagacccttcaaattgtccaggcccaccctcagtgctgaggactgagctaaggcctttgtactatagttggccttcttgtttaggagacagcaacgtcactgtacgtctaagactgccctagaactcccagcctcaagctgatctcatgccccagtttcccaaacaccgggactacaggcacagcccgccatacccagcttagcactcagaggcttggctctaggtttgctttcangtccccaaacaataaaaattagaaaaatag

SEQ ID NO: 1528 - DNA, 311 bp, Homo sapiens
  misc_feature (1)...(311): n = A,T,C or G
actgagcttccacttgggcccccgnntggctgctctttctgggcgtccccttccccntggccggggccgaggacacntgcttgctgcgcaagagtcttcaggantggctttggtttcacccntgcgccacttcntcgtgtacccacccgagtccggccgtgcacttgcattcttgaaggaggaaganaaatggaggcccgaaggaaggaanangagganggaggagggancccntccccacggnancngcttggnggccccagggancacatttttttngaaaaaaaatgggangggaagggggggcccca

SEQ ID NO: 1529 - DNA, 310 bp, Homo sapiens
  misc_feature (1)...(310): n = A,T,C or G
ttggtgctccgcgacagcangtnncgaagacatacactcacantntggcctangcaggaacagcagccctgtgcataccatggngtcanggaaaagacntagaagaacaggagtgctcganctgattggccgaatagatanttaatantggctgcnnccccacnnaggtacctcagcctggggcctcagccaagatcacctantgaggatacacagggcccgattataaaatggagcttaatatataatataantattacattattgacttattgnattnntattctcattaaaaacactttcaattcaa

SEQ ID NO: 1530 - DNA, 308 bp, Homo sapiens
  misc_feature (1)...(308): n = A,T,C or G
tactgcctgcaccattagccttgaataagctgagctggtctattgtcactttgaaagnagnaggtattagacatccgaacaattacacangactgcctacatnccgctanatanntgagcctgngctacctcagttgacctntaaacagctngttttcactgnctgggttttaatgctctcatgtgnaaaaangganacngtgntatttgcctccttgagttgnggacnnccaataaccanctgatctgnncaanatatatntnnatgtgatcntcatcctcacatnngacctaacatataatatctt

SEQ ID NO: 1531 - DNA, 307 bp, Homo sapiens
  misc_feature (1)...(307): n = A,T,C or G
tgaaggacttgcgaaagccctcattacacggtnctgccntgctnaagagctnttcctgagaaattaaaaactttaaccctggttntttccaaagaacaccttgngactggttngngtactaaagggtaaagatttcctgctggcaggaggccatcttctgctaacttttaggcttactgcacaaaagcttaagcacctgacaattanctatttnagtaaatntncaagacacttntccatttcttttcagctaattcactgtttttggaaccaacattaaaaaaattcaacttgcaaaaaaacaaaa

SEQ ID NO: 1532 - DNA, 307 bp, Homo sapiens
  misc_feature (1)...(307): n = A,T,C or G
agggggggccccccaagccgctntatacgtttggggatatgtttggggncccacntgggngnggacnggnccgggctnactntttcttggtagnaanntaccttggttggnaaccccggctttccctttttcccaggggaaccaaacccnttncccacaaaaccccggaaaaaggaaaaggccacccctggtaatttggggaaccttggcccaaggccanccctttcaaaagggggccccaaanaaaaagggggtggttggggtaaccgacanttggtttccccgaggatggccagccttgcccatt

SEQ ID NO: 1533 - DNA, 307 bp, Homo sapiens
  misc_feature (1)...(307): n = A,T,C or G
cattgctgtggtgctctgntctgcaggngctgtgcaagcgctggggtgctcttcgacaggctgtgttgctaacaganggagcatccttgagacgttttcctgcaatgatgccggtgagccatgccatggcttaagaatcgcccagggagttgatggtactttntannacttggggcccagtcttggaatggtagcttaatgtttgacagtttaaactggagtagctccagagctctttgttggctccaacacatggataaggttttctagaacatttactccatcccatcccccaattaaaaaaaaa

SEQ ID NO: 1534 - DNA, 307 bp, Homo sapiens
  misc_feature (1)...(307): n = A,T,C or G
gagaaatacctaatgcattnctttganaacctccacatngcncactggntanctnttcacaggcntcacagncnntagcctctnacnggagngnnaggaaggcagctgncagctggctggagnctgncanccacaggtagccnaactggaatatgctcttcanagctcttcacaganagatnacantcngacagggtntngtgaaccccccngaacgcgagaaggatcgaggtttaagcatgttgggaaaaactgatcccggcactgtcttcgngatgaataaaaacatctcaaccccttacagttg

SEQ ID NO: 1535 - DNA, 306 bp, Homo sapiens
  misc_feature (1)...(306): n = A,T,C or G
atggcgcttgctacatcttcccgaangacttccatattggtcagtctcagtcgacttgggttttcgcgtgccgtcaccaagctgtcgtcccgnccgccgncgtagggnttccacccacggtcngggggagccagcccgcccatcccggnaggggtgacattntgaggggtgctgtgtaggagcnggggaagggacaacccgaacagtttcgggcgacgcgacactctcgccctnacgcganangantntgacactngaggagggctccactcaagcgcacaccctatcgagggaaggaagcctccc

SEQ ID NO: 1536 - DNA, 305 bp, Homo sapiens
  misc_feature (1)...(305): n = A,T,C or G
ttcttcgattcccaggctaccgttgactccattattattcaccagggagtggtaaaatgtgtcttccattcaaactgttgatgggtgatgacacggacctaggaatctttatgaaggtncggnntatgntgcagtttgnanngngtaccnaaaacagnantatnnantcgtttatccctcgncccatcncnccacagcaagtctgcctctctcttgtttnccngtgcgaccgtagcngcctnngaggcacatggagtgaatnggggngatgaaggaggggggnctgtgtgggatgagaaaggggt

SEQ ID NO: 1537 - DNA, 304 bp, Homo sapiens
  misc_feature (1)...(304): n = A,T,C or G
gtgtgggactgcaacatcagcttggactgaggctgagcacagagcttatgctgggaactgccctgcccactgcccggactaatgattgcactggggacacatgcacctccaaggagaagaggaacgtgaagggagaccttggcttaggggntgngatgcagcctgngccttctgtttctctgggctggccaaaccatctggaccagggatngacacttgggctcccctgaatcctgcttggctctctgacataggtataagataatggggttggctagcagccagcatgcctgtaaacctcacc

SEQ ID NO: 1538 - DNA, 304 bp, Homo sapiens
  misc_feature (1)...(304): n = A,T,C or G
cctactcctaggagcatncancactgaaagtgcttcagaangatncctntcttccaagtggcctgcgatcagctgctctgtcttgaggactttccagaacagggtggccagaagaaacactatttttcgactcagtgagatctgccttactaagactccagccctactgagaaagctcatggagcctggaagaccaagagccaaccttcggagggcaggcaggactntggccggatctgtagggcactgccctagtctcactactatggcacgtggtttcacggnaggttttgacccattgggg

SEQ ID NO: 1539 - DNA, 304 bp, Homo sapiens
  misc_feature (1)...(304): n = A,T,C or G
cgtgcactatttttacgnggaccnccanattactcctggcanngaatngaggccccnnccctcttccttgatatggtggagcatcaccacataaacatgagagatcttgacagaagtgcaaaaggtnacanaagccctgnaattggnaaaatanatttcatggctagcagaactagcttcactgatttagaaaaatagaggtgcacaatgctctggccgctccttgaacccgtgtgtctgccaatgttntggccgctccttgaacccgtgtgtctgccaatgttctgaccgttccttgaaccca

SEQ ID NO: 1540 - DNA, 303 bp, Homo sapiens
  misc_feature (1)...(303): n = A,T,C or G
gtactcccgccgtgttccgcnattcgncgtggcggngacngncaggcnncnnggcaccntcntcccggcttcnnntcannnttgcagtcgancanngcaaaagcctggctgtgcggggcagaactcanacgccttcccttctgccgttccctgtgcccagtggataatctccaganacgagtagtcagctttgttgtccctcctgcagcctctccacctgcccgtttcccatcaagaaagtgtgtacatgtttaaaaccttttattgcaaataatacacatgtgaaaaggcaagaaaaaaaaa

SEQ ID NO: 1541 - DNA, 303 bp, Homo sapiens
  misc_feature (1)...(303): n = A,T,C or G
agcagaaaggatgacagtctctgcaccttatnttcagcattgcctgcacacaccaagaccanggaccctggcatcagtgtcgcctggtatgccaccggaagttaatggntgctttagtaaactcactggccttccctgggtatgaagactacntaaaacaggggtgntgagatgttcactgggtaaagagacctaagttngatccctggaacccatggaaaagnggaanaagctgccggagnccctctgacttccccccaacttgggctgggggncctaaccctgnacccaaccccccaaccc

SEQ ID NO: 1542 - DNA, 302 bp, Homo sapiens
  misc_feature (1)...(302): n = A,T,C or G
agaagaagggagtttcctacatgcaagncaaatgacatttgtgtctgaagtgtgtcttggtggcatcctgtctgtcattgctgtggtttcttctccattcttcttccaataacttatctcaatggatctttaatcatggagatattactgactttttctttttgagatagggtatatagtcctagttagtctgaaattcaataaatagctctgcctgcctttgcctccagagtgctgagattaaaggaacttaccagcacactggcttttattaatatcttagtggcatttaaaaaaaaaaa

SEQ ID NO: 1543 - DNA, 300 bp, Homo sapiens
  misc_feature (1)...(300): n = A,T,C or G
acttgacttgtgggttccagtactcccngccncnggtccganggactcccgaancngtanctgtcactccgcagccctgtttccttacctgcgcattccaacgggtaccgttcgccacgtttgggtgttacccccaantcttgcntgggtccaacgcagctngancccaagtgaccantgcaganccngagancanttggacantccttcaaggaanaacangggaggcaccctgcatgttaatggaaaganggagatacctnttactaaaatcaatgacgctggcctggtgaaaactaa

SEQ ID NO: 1544 - DNA, 298 bp, Homo sapiens
  misc_feature (1)...(298): n = A,T,C or G
tgcccgtgaccctatgcanggatgtgttctgtgagctttccgtcgcgangaatgggctnctgctgngtccttcacagacgantcctctncaacgatgtgatgttggngaccctnccggancctcactgcctgtaggcctacaacttgggnngaacntnnctcttgangaaccttgtcaaagttccagnngacctggaaaggnaattttcntgttcaagttgntntngatatnccttctaaanaaaagttaatgtgtcctgnaacttttaaagaaaagcaacagtgtttaaaaaaataa

SEQ ID NO: 1545 - DNA, 296 bp, Homo sapiens
  misc_feature (1)...(296): n = A,T,C or G
gaggatgcttgggaccttgtctcagaatggaatgtctctaaggatatgnatttaggctcgtgtcccttcagaccaatgaaccctatcaagncccattccttctgatgccatctaatcagctattttcagcaagccatgaaatttaagtaatggcaagagaaagttcctgccaatctacctattgaacagttttccttcatacggaaataaaggatangttaaaaagcccagncattggctggagagatggctcagtggttaagagcacntgactgctcttctacaagtcatgagtt

SEQ ID NO: 1546 - DNA, 295 bp, Homo sapiens
  misc_feature (1)...(295): n = A,T,C or G
tctttcctatgcagccatctctccagtcttacctgctcttgcggctccgttcagccatcacatgctacaataactacctaaccgcatgacgcgcatgtgttcaccccaggtccaaggtcaaagtcttcaagctgctagcttcaaaatggccacaatgggaacatttctgtcacaaaagttggctagcactagtgtagnggtttgaatatggttggcccanagaggggcactatttggaggtgtggccttggactgtgtgtgtcactgtggncataagcttgagactctcatccta

SEQ ID NO: 1547 - DNA, 294 bp, Homo sapiens
  misc_feature (1)...(294): n = A,T,C or G
gggagatgtgtctgctggctttgtgtgnccactacagnnctnngnncnacaccttaccantcgaatngtggnatgnanaactgnncnntnngnggacacgatgcagantctacatgacggtgagatgaaaagcaagtggattggagaggaacacagtagactggggaggagaattaggaaaatcactgggaaagcattattctaggaacaaccttaccactacctgcagtggtacttccggcctcattcctaaagatggttaataaactgctaatcaacgtttaaaaaaaaaaa

SEQ ID NO: 1548 - DNA, 293 bp, Homo sapiens
  misc_feature (1)...(293): n = A,T,C or G
ccagcacacccactgagccagctngctgccccattggatgctctgtgaaaggagctgcttttctggcttgtcacctgcggcaactgactgcagaagactattcttgctactgctgtctaagggcagnctgtcactnagaggctgtgtcaccacagagtntgctngcacaccctgaanacttgngtcngctgtngnntttntccttcagntnnatgnncttcaaatttctgaaatctatcctgntgggcttgattgattangtntaataaagcacttctattataaaaaaaaaa

SEQ ID NO: 1549 - DNA, 293 bp, Homo sapiens
  misc_feature (1)...(293): n = A,T,C or G
agacttgaggctcccctgccctcccgctggtagcagacgacggctcccncnccgcagatctcttgtnaacagcgngtcatatacaccgcctggatnntttnaccggacaagcattagaacannncctgcttccgttccaaaaacgatggcantcgtttnntgcccctcannggagatggcaggtacagtgccnttgntaaggcatgcctagaaattacctganttaaaaatgacctgtgtgaaaaagccaanntatgaattaattaangcttttnatttatcacacttactta

SEQ ID NO: 1550 - DNA, 292 bp, Homo sapiens
  misc_feature (1)...(292): n = A,T,C or G
gaggctgctgaggtccggaagcaggtgtcccgggacgcagcggctcaccccaccncagtnttcgctccagnagaaaccngggggngccctctgacggaggncatcgaacccctggacttcgaagatgngctncnagagccggccacctgaagtagcagcccnggncccctcagggactngatagagnctccagnagaangacnnagcaacnacngaagcaggcccntagaatggccggggccacagagtctgggngngccagaggatgntttttttttttgcccaggggagg

SEQ ID NO: 1551 - DNA, 291 bp, Homo sapiens
  misc_feature (1)...(291): n = A,T,C or G
ccaccaatgcctaggtctcctgtntaantgaanatacantcaagatcctcacctgngntcangccacccctanaaacaataaatcctgnaggaccgangccaatntcctttactcctacagcatgttacaattcttaattancttgaaccttataaccttaagtggtattttgatctcactgataagtttacattanacccttcaatatatacncggggggggnatgactacncacncctacccccncatngangtatancnatgcattcctgtaatccaattctcaaaaa

SEQ ID NO: 1552 - DNA, 290 bp, Homo sapiens
  misc_feature (1)...(290): n = A,T,C or G
ccgcccccgctgcctgncnagggaaggctctgaagantggtangctgcngagactctgagctggaaganncagagaccagcttagctgcctggangagggttagaccaaccgaggcctcctgcaaaaggacacctcctcaaactgtgttgagatgcccacaagcctgtgccngtgtgcnttcaggttcccatgcntgggtggggcccttggtcactgcagcctgtctttgagtcactttttgctcctgtaagtatccctaataaaactcattggttcacgaaaaaaaaaa

SEQ ID NO: 1553 - DNA, 289 bp, Homo sapiens
  misc_feature (1)...(289): n = A,T,C or G
gaagggatagacgacaccaangaaacagtgtcttncaaatacaacaggactggcagtncatatgaacatcacagagaccntggnagcatgcacagggcctgcatagatccaaagctganctnaaactgcaagagtttgtccccttctatcttatcctctcaaatattgtgtgtttcaaccggntgtggtggcacacgcctttaatcccancacttgggaggcaagaggcaggtggatttctgacttcgaggccagcctggcctacaaagtctccatctagaccagccct

SEQ ID NO: 1554 - DNA, 287 bp, Homo sapiens
  misc_feature (1)...(287): n = A,T,C or G
ggagacgaactggtggaatttttcaanngttctgaactgacttcttcaataccaggaggaacttatgnaagntagnnnagctacgatgtattgtgccacgtganatatncttgcnggagcnaacctaaaatctgcntgaggggggtgggtataataggtttgcccagatncntgcaataaancagccttcttttgncnnngcccnatgaaanttcttcctggagccagcctaaaatttgcagagggggngggnataaaggggtgcccancccctgcaataaaccaaa

SEQ ID NO: 1555 - DNA, 319 bp, Homo sapiens
actgaggattgaactacagctgcctggagtctgcctgcctagcaggactggtctacagctgctggattgtatttggtgtttgctatgggactgaactgctgacaaagaagatcttcaagcttgcccccaaagaactattactgaacaggtccacttccccaaaatcctaataacttttctcttctactacctctgctgggtggtgagctagaggagaggttgaacccttattaaaagtaggttgcaaaaaatttatgccaacagacagggaaaggggttatgactaggtaataaagtgactaacttccaaaaaaaaaaa

SEQ ID NO: 1556 - DNA, 286 bp, Homo sapiens
  misc_feature (1)...(286): n = A,T,C or G
ggtgcgtacgccccgccnggcgaccggggggtgcgcctgcagccttcaanggcccnatccttcntgagccncttctgccccctcctccctaaaggnttcatgtttcccnaantagcnccaccagctggncaananncattcnnaacatgagcctgagtcaggcatttcagcctcaaagcacaagattaaaatatctaactttgggatagcattgaaaatgtaaacgaggaaaattcctaataaaaaaatgataataaataaataaatanataaataaaagatctaa

SEQ ID NO: 1557 - DNA, 286 bp, Homo sapiens
  misc_feature (1)...(286): n = A,T,C or G
gccgtgcatctgcctgcggggcntccacctgttgcntntcgcannctcntcnnacccgatganaacctngtggcgtcanactgancctggcnagcctntctgtctccngacagtgggtcaccctgcccttgaccttgtntgcctgangcaatggcgcctgccccctgtattcgcananccatcaganganaggagccttggagacaggaagantttctaccgcaatgtgaaggtgacgaggttgaagatctctatgaactgttgaaacttgttaaggaaaaaaaaa

SEQ ID NO: 1558 - DNA, 283 bp, Homo sapiens
  misc_feature (1)...(283): n = A,T,C or G
agaacaggatctctacctgactnntctaccaccaangatnntgaacntacctggtatgatgcaacccaacacactcacgggatctgtggcaattggagtgtgcctggcccaggaaatggcactcttaggaggtgtggccttgctggaagtgtgccactgtgggggtagtcgttgagagtgtcctcctaactgcctgaggatgccactctctcctggntgnctttgaatcaagaggaagaactctcagctccttctccagcactgngcctgcctgccgctgcgg

SEQ ID NO: 1559 - DNA, 281 bp, Homo sapiens
  misc_feature (1)...(281): n = A,T,C or G
agaccaacctagtgtagcaaagcataccaatgaaagagcaccatnagtgaagaccancnnagtgtttgcaaggtgaaccaatgcaagagcatcctctgactgtctgnggggttgcatttatattctctctanacaccacatactattttaagcatgtactccagcaaaacatcncattgcccttcacaagacagnttccagaaaaacaccatgtgtctgttctcagcgaaacatcctttcacatgtctgcttcaacaaaacaactcataggagagcttcca

SEQ ID NO: 1560 - DNA, 281 bp, Homo sapiens
  misc_feature (1)...(281): n = A,T,C or G
tggagtgtgctcttcaagccancatcctcaacccaangacttctacctgagcntccactcntgatgttgaatagcttaactnaggaantgacnaatangccttgngagangntatncntngattccngaatggggatgtgcacanaganntgggccttgctcagagtgccattctcctcgctcccagacactcttcctgtaacgtgccttaaagacagaccaataagcagctctcacccaaatggcattctctgcctcttccagagggcccggggactatc

SEQ ID NO: 1561 - DNA, 279 bp, Homo sapiens
gaactgaggagatcctttcaactcagcttcacaaaatacactatctgagctcctggaggtcgatgcccttacttcctaccctacacattctccgacatgctccatccatagcaagggctcggtatttggaattccctgtttgtactgccccagcaaggcttttgtacatgcttctccttctccttggaatgtgtcctcctatccttttgtaacccctgatatatgttccctgagtactttaaattgcattataataatctgttcacttaaaaaaaaaaa

SEQ ID NO: 1562 - DNA, 278 bp, Homo sapiens
  misc_feature (1)...(278): n = A,T,C or G
agactgagcacagcaggcagncnnaaacaagtagaagtatcaagaactggaccgtgaagcaccaggaactgactaaggtgcntacnntacccaccnaagcanagntggnctncaggtgncccanctgcnccnntcatgacgattacctggcgctaccnctgcccanaacagggaacatnctccagcccangatgctctggccnccctcccncaagagtcgtcctcnnaatataagcnagacntntaggctctgcccttctttctgttcctctacttct

SEQ ID NO: 1563 - DNA, 278 bp, Homo sapiens
  misc_feature (1)...(278): n = A,T,C or G
tgtgagtagagaagcctgcccaggatcagcaccgtggaaagcacacatgcacacacatgtgagcttcccatgtcccagcaggtctccttaacctgaagccatccagctgggatccaagaagacaaggggaggtgagaacactaatgacatctgaaagcctgccttncacacacactgtaagaggatggctctgaaaaacaagtgggtcacaggagccattcccaggtgtgccctgcctcagcctttttgatcttacaatcttcattttttgaaaaccc

SEQ ID NO: 1564 - DNA, 277 bp, Homo sapiens
  misc_feature (1)...(277): n = A,T,C or G
ctccagactcaaagggctcaagtcctgaaagctcaaacttagggatgtttcccacataaccctttatttctgtccctgggatagagtaagcccacagtgccacggagaaaggatgcgtttcttgccctacctcctttcccatcctatactgtccccgagccagggtctataaacctgacactttacatgtgttctcacacataagtacacacccacctacatgcgcctgcacaagcttntttctcctcctcccactcctttagctgctgttgcctcc

SEQ ID NO: 1565 - DNA, 277 bp, Homo sapiens
  misc_feature (1)...(277): n = A,T,C or G
gactgaggggccctctatttaganggtaangtacggacagaanagnagnagangnnaagaganganatnagaanagatgagaagngaagagaagcagaanngnatagatgngatgagagcgagtngnccccagacattgatggngangntnctcatgttcntnatcagcactcttggaggcagagacnaaaagatctttgcngtgcaagacctagcctggtctacaaagcaagttccagaactaaacagagaaaccctgccttgaaaaaaacaaata

SEQ ID NO: 1566 - DNA, 276 bp, Homo sapiens
  misc_feature (1)...(276): n = A,T,C or G
gattacctctccagcctaaggtgtggaggaccctgancatctcacaggtgctcttctagcntnaacattncnatgatcgcnttacgcgtgtcagatgggggcctcaggncctctctntggctttcatgacaaacacagaanatgtccttgctcctctttgcgacctgaagattcgagnnacgggntgggtntcgttgncnnngcacggancaggcggtggcttcatncnatgatatctgtgaaaacgctangtaaccttctagaggagaggtggtg

SEQ ID NO: 1567 - DNA, 276 bp, Homo sapiens
  misc_feature (1)...(276): n = A,T,C or G
gaactgagtgctgagactgcagatgtcaccgtgtgcagttttttntgtgggtgctgaggnncccactcaagtcttcntgcttgtgtgcactttacagtgtgctcaagccctcagangtctgacgaagctgatttcattagtttcaatagtggggttaagttggccgcatatatacatatatatctttgtcatgtactgctttccagggaaactttaagcaaacatatttgtggccagtttacctcttcaacaacctctcgtagtcaaaaaaaaaaa

SEQ ID NO: 1568 - DNA, 274 bp, Homo sapiens
  misc_feature (1)...(274): n = A,T,C or G
ccacatgtttgtggaaanacattgcttacaatgtgaaggaatggtaagatatgtggatgannacanccatnccatngcccatnaacacatgaatattcangaganncnttctaaatggcncaancttaacaagtgctgattcnngantccntccagtgaacaccttacatacactanacncnggtctnactctcttcaatactcagaaccanantngacttagncccccagggaacactaaagaangtttgcaaatacaatgactctgtaaaca

SEQ ID NO: 1569 - DNA, 271 bp, Homo sapiens
  misc_feature (1)...(271): n = A,T,C or G
gactgaggacctgtctggntgggaaccgggctcgncacccgctctgctgagcagaacagggcagtgtcctgaggaaggtgctacggnttgcagtgggagagctgtgggcatagaaccccagaccctgctcgaaccctgancgctnngcatggcacgagntgattntcanagtcctgggttccttncncnangatanngannnnntnnccctgaacncccaccanggtcnttgtgaggctccnatgggacaactaaataaataaataaataa

SEQ ID NO: 1570 - DNA, 270 bp, Homo sapiens
  misc_feature (1)...(270): n = A,T,C or G
tttagactgagagccntaggagncactgagcncccagaganggaatcaacaggttgttaacaagccacagatgctggaatcggaaagagcancaaagacttaactgttgagccatctctcctgcttgaaaaattgttcttgcaactgggatcattncagtgtctctgtgggtacctactatatttttatactgatttttatattattntccagtgnagaagcaactgtgtttattatatntaaaagctatttnaggaataagcatgttat

SEQ ID NO: 1571 - DNA, 270 bp, Homo sapiens
gactgagatctaggtcagaagcctgtgtcttccttcctcaagcatctggatcacagatgtgccctccacttttggattggagttcattccagatgcagtcaagttgacaagcaggaatagccatcacagatggcaattcctgactggttaagggtctcatgtaagccagacacttcaaattctctctgaaattggccttaaaatctttactctcctgtctctgccttccaaatgttgagaatacaggacacaatgctggaaaaaaaaaaa

SEQ ID NO: 1572 - DNA, 270 bp, Homo sapiens
  misc_feature (1)...(270): n = A,T,C or G
ggcccagcagacactttctgccgaagccagtcccaggcnttgagnaatntgaagatgaggtgaccttcngatcctgccgccgcntagaggagccccgtggctctccccngcntccccccgtcagnacaaggttntccccctnntgggtgtgtnncantnnccntgtgttnccntgngccctcgacccncctgtggagttgtggtttccnntgtcccnttccctgtcaaacaaaacaaagccatcagctctgggttggaatacaaaaaaaa

SEQ ID NO: 1573 - DNA, 269 bp, Homo sapiens
  misc_feature (1)...(269): n = A,T,C or G
acaggtaattttcaccaggaaancaagattgnactgaaaaacctcanaaaaggaagcatacatannngcacntgtgctgnagagatgnancancggnnaagagcnctcactgtncttcnnaangtcctgagntnanacaacagcanccacatggtgactcacagccatccgtaatgagaccggataccctccttctggacagtctaaataaagacagctacagtntacttatataataaataaataaatcttaaattaacaaaaaaaaa

SEQ ID NO: 1574 - DNA, 269 bp, Homo sapiens
  misc_feature (1)...(269): n = A,T,C or G
gggttccaaaaggtttttttgggccttggggaaaaaaggttccccactttaaggggaaaaaaggaacttaccggtnggattaccttcttttaccaanggtggaaaaaaggtccccaaaggatttggagnaccgggaaacttccaaggaaaccaagggattggccaaccaggaaaggttccgccaggaaaggaaaaaccccagggaaaccctttgggatttaaattggaaaaaaanggcccccngncttggccttgggggggggttgggc

SEQ ID NO: 1575 - DNA, 268 bp, Homo sapiens
  misc_feature (1)...(268): n = A,T,C or G
actgagggaggatccggcttgtgactcactcggacaaagcttgtgtcttctgccattactgtaactgagtgcgtgtccggctgctgccgctgagtggctctccattaactcagccgttgcccacagtgttaaccacttggtatatattatctnacttaaacctcacaacaacatcctgagccagcaacgagctattcttaccttttttcaggncttattttttaatttttatgtttgccttgtgcccacatgaataaaaactaaaaaa

SEQ ID NO: 1576 - DNA, 268 bp, Homo sapiens
  misc_feature (1)...(268): n = A,T,C or G
gactgagggactacagtaaacactagaacacacgtcctctgcccactgaactctgagcagcatccaatgctaaaaccacaaaacacacatcgagagcaggataagtcaccaacaccaaccctccnttaaaggctcacccccacaggcctatgcggcattcatactcttccgtttctgtggacaacagccttgaaaaccgccagtggatgcctagagtaaagctgtataagcatgttcaaaaataaatttcatttgagacaaaaaaaaa

SEQ ID NO: 1577 - DNA, 268 bp, Homo sapiens
  misc_feature (1)...(268): n = A,T,C or G
gactgagctcccattccttgaccctgtgattaaggaccnttcnttcagctagatactctgagaaggaagttctggccggcaggaatgtcagcctaaaagatactggaaaatagcaagtggagaatgaagtcagcacagaaccaagccaagctgggcaagatggacgcctctgaacacccagatggagcccttcctgaaactagatagcattgtggcttggctatgtctctggattcataaacttcttacttcttctgaaaaaaaaaaa

SEQ ID NO: 1578 - DNA, 267 bp, Homo sapiens
  misc_feature (1)...(267): n = A,T,C or G
gactgaggtggggtctttngnttgctgggaatttgaanttcaggaccttcggagagcngtcaggtgctcttaccnactgagncatctcaccagcccgtatgcatgcattattatgcatgaanctacactgcagcatgtcttcagacacacaccagaagaatacatgggatcccacnggcagatggttgttggaaattgaactcaggacctctggaagagaggtcagtgctganccntntntcaaaataaaacttgtggagaaattga

SEQ ID NO: 1579 - DNA, 267 bp, Homo sapiens
  misc_feature (1)...(267): n = A,T,C or G
gactgagacattcttaagggagccctgtgaacgctgatggantgtttgtggatggctatttagtccttaacatctacactacantttctgnttcctggagcnttattcgatggacatcaccgtgccctgaccttanttcttctccattccttctgactaggtgacctctaaagtctccctttcctctgtaagtcccttnttagtgtcaccttntgggtgatatagtttatcttacttaaaacagcagttatattatcaaaaaaaaaa

SEQ ID NO: 1580 - DNA, 266 bp, Homo sapiens
  misc_feature (1)...(266): n = A,T,C or G
aacttgagtgcctgatgtgaagcaaactaagangtgaagaccggcgtgnctccggcntcacagtctgaggaaccagtccntcaaagcagganggagagaactnntncncagcacttacnnnatacntatactttaagaactgnacaaaatnatcatgacagaaacngcctgactgtcannaccnacanattgaatgtctgataacanggtgcncngattcctctctcttggcanactcctgnanaccccacctggcccagaagacc

SEQ ID NO: 1581 - DNA, 265 bp, Homo sapiens
  misc_feature (1)...(265): n = A,T,C or G
tgagcatacgtaaaccgccccgtcgtccacttcggcgggcaaccagtctnccccagagacaccggtactcacccgctcagccacncanncacccgcggctggggtcacctgtggccgccgccnccaccatncacgatgtctaccgtcacagtcacggctccgnccaccgccntcacggnaagcccggtgaanaagcagaggccgntnttaccgaaggagactgtcccagntgtgcagggggngggtgnggaacgcatcaactgtc

SEQ ID NO: 1582 - DNA, 265 bp, Homo sapiens
  misc_feature (1)...(265): n = A,T,C or G
ctggaccacaagagctattgcgtgtggnangctggatccctngntcnttccntcatnactgntgtgnattcantganatggtgagcctnngtcagagctggnatnctgacaacaaagagcggagtcactgcaagaaactacttctaaacatgtccacaacccccctttcttactaacctttttttcttgcctctggttggtggattagaaaagaggtttaaccatttaaaaactctaaataaagtaggttttgaaaaaaaacaaa

SEQ ID NO: 1583 - DNA, 264 bp, Homo sapiens
  misc_feature (1)...(264): n = A,T,C or G
tagagcctgcgatccncccgtcccccgtnnatccctggcgcctgntctggcgccggttnccctgnnacccccnctgcgaggngccgtgggcagtcagtcnggtaanganacccctggagtcttcccccacggcanagannatcaccacctaacacctcaaactgagccaataggaaacaactaaccctaaatcccaccccactcctaatgtttataaagtccctgtccacatggaataaancgcacaagttatttcactgagaa

SEQ ID NO: 1584 - DNA, 264 bp, Homo sapiens
gactgagatggcctctggctgaactgggaaattgaccctttgtgcgaggctggcttgcctgtccctgggatctacctgtgtccacacaccagcaatgaatggggttacagacatttatcatttcatcaggttttttatacagatgctgggggttcaaactcaggtcccttatgttttcatagcaagcacaatacccactaatagttctccctagccctatttttcaagtatgtttgtccaaggttttggggttttttttttgtt

SEQ ID NO: 1585 - DNA, 264 bp, Homo sapiens
  misc_feature (1)...(264): n = A,T,C or G
tttggaaataatgttcacttgtccgtctttgtttttacctgcatatttagcccctctgnnactgtagatgggctaaaancatcatgagcatggttttatttngggtcatatnctttgatattacactccatatatctnctgcatctatagnnacgcaaaangtntcnaggctccaagaatgaatntgatgggaatgnacnncccccctcttttatatgntgacgtccaatcnttaanntattngacccttgatcaaggagtgct

SEQ ID NO: 1586 - DNA, 264 bp, Homo sapiens
  misc_feature (1)...(264): n = A,T,C or G
gtctcattgcacagctgggnctgncctcacacttattaagtagcccancctgacctganaatccagatctcttgcctcaaccttacaggtctaagcctggatgaaatcatggncttgaagaatattcaagaaacaggaaaggtatccaacagactattaaatgacagaccaccttcaacagtttcattagataaaggaaaaccattgtacaaactatgttattgttactgaaaatggagaaaataaaagagccctatttctaac

SEQ ID NO: 1587 - DNA, 264 bp, Homo sapiens
  misc_feature (1)...(264): n = A,T,C or G
ggctcgatatcatccttcagggactcnacatcatcttctgctctgaggctgnancgancccacccagcacacacaaaccngtcaacccggattgcagcggcctcagctattcactacccaggtcctggtggctgagcancaccctgagcttgntggaaggctgnagagagatgcaatgcatgagttgtaatnccctccgtcnngntnanagtantgtgaggacacgancgttgctatccncnggaaggcacaggtctgagatgc

SEQ ID NO: 1588 - DNA, 262 bp, Homo sapiens
  misc_feature (1)...(262): n = A,T,C or G
gtggtgagcagaggtggtgggccncgccnaggaggtttggagagaagnccatttntgacgccctagnganagccccnngantcaggagacngggtggtgagggaggtcacctgagagggtcacccacnncntcacntgntgcatgttacccntgctggcaganggccntgggaaggactgggacangtgagccntgccctaccagcatggcntggcccttcctgaaggtcaataaagagtgtgaaactgtgaaaaaaaaaaa

SEQ ID NO: 1589 - DNA, 262 bp, Homo sapiens
  misc_feature (1)...(262): n = A,T,C or G
gcctctggggaagccttaaatgtgaccaagaaaaccaccttttctaatccacgggtttccgggccaacaggctcccctccggtttggatagaggagctggtacagagtttgatcagtgtacaagagatgaatgtantggttgntgattggaatcgaggagcnacaactgtgatatacccccatgcgtctagcaagaccagacaagtagcttctattttgaaggaatttattgaccagatgttggtaaaaaagacttgtctga

SEQ ID NO: 1590 - DNA, 262 bp, Homo sapiens
  misc_feature (1)...(262): n = A,T,C or G
ccttcccaggggcttaggggaaagcatgccttacagntgccctggactttcgggaaaagttgnagggaaaggggggccttgaaagnagaaggggnagggaagaagttttcccaccagnaaagaatnctngggagggnagccttaaaaagnaatttttggttccacccccttggggcctttttttttggtgggagggaaggagggaacccccccccaaaaagggaagggccttccccagnaacccggccaccaagccaagcca

SEQ ID NO: 1591 - DNA, 262 bp, Homo sapiens
  misc_feature (1)...(262): n = A,T,C or G
gtgccccttgcggcgcctctnggngncagtgttttattgttgctgaacctggaactcagaacctgtgcatgcccggttatgaggcgagcattnnaanagnttgcagcantgcacatcaacggnttggcagganntttntgcgnacgcccgtggtggaggngttgggttaagaggttccttnctgnggcaacaacgcttgtaacgcncangctctcacactgtggaggaanagcggacatgaccancttcggagttaaaaggg

SEQ ID NO: 1592 - DNA, 261 bp, Homo sapiens
  misc_feature (1)...(261): n = A,T,C or G
agactgagggacaggactactgggcatagtggccttattgnaagaagtgtgntataatggggtcaggctntgagggtncatatgctcaagctatgcccagtatgacacacangctnctgctggctgtggatctagatgtanaactctcanctncttctncagcaccatgtttacctgcacactgccatncttcctgccatgatgataatggactaaacttctgaaactgtaagccagcaccaattaaatatttccctttat

SEQ ID NO: 1593 - DNA, 260 bp, Homo sapiens
  misc_feature (1)...(260): n = A,T,C or G
actgaggaaaggcaggcagagctatatggcaggagagcccgttgtcaacgcccaggttttggagccggaggaacacgagctgttcagcagaggacaggagtccgcctggtcaaaagatgtgtggaggcaaacagtgcacacctttaatcccagcacccagaggcagaggcaggtggggttcgtggccagcctggtctacagagcgagttccaggacagccagggctatacacagaaaccctgnnttcaaaaccaaaaaaa

SEQ ID NO: 1594 - DNA, 258 bp, Homo sapiens
  misc_feature (1)...(258): n = A,T,C or G
gtcctctggcgctggagacaggactgctacacngagagcccnngaagaaagtgaacataaaggccactngngngctnctcctggntcctncttctggatgctcctcctgggtgctnctcctcagactgtttccagnanatcaggcccctactgtccaatccatnagctctgcagttcatcttcagacttaagcatanaaatggatagatcttactgaattcgggggactgtaaatctgaagaaccttaaaaaaaaaaa

SEQ ID NO: 1595 - DNA, 257 bp, Homo sapiens
  misc_feature (1)...(257): n = A,T,C or G
tgtagcatggatcctanaactggaccattcattgggnggncacccacataggggcctttcccccttgatcactaattgagaaaatgccttacagtngaatctcatggaagcatttcctcaactgaagctcctttctctgtggtaactcctgctgtgtcaagttgacacaaaactagccagtacatcctgctaatctttttctccaatcctgatccttctatttttataaaataaaattttataatataaatataaaa

SEQ ID NO: 1596 - DNA, 256 bp, Homo sapiens
  misc_feature (1)...(256): n = A,T,C or G
aggtgatttggcttctgcctgttangtaggagcncccttccgacgggaggnnagcgctgntacnccnnctgtgnactnacatatactttnagatgatcatcagcccacataccctgtaacttatactcaaacatggganggannngtnaagtgcttttataatacacattattgttaaaagcaaggattgactcttttgttttattttgacatggcatgtcctgaaataaatatcanttcaatatgaaaaaaaaaa

SEQ ID NO: 1597 - DNA, 255 bp, Homo sapiens
  misc_feature (1)...(255): n = A,T,C or G
cgagtcccacattgcntatccaggaccaaagctgcttganaacngataggncgtgtcttcangaaagctaacanagaatnttnngngatggancttcaaggcaacaactgtgnaaaagtcacngnngatgctgcttactggcttgctcccatggcttcctgtcgnataccacctgnaaccacctgcccagttctttancacagagtggaagcctcananctttacactgacattggtttcaataaaagcctcata

SEQ ID NO: 1598 - DNA, 255 bp, Homo sapiens
  misc_feature (1)...(255): n = A,T,C or G
tacacgtggtagccgnggcttgtgccagtatctgaggacacggcatactgncaagatcgttganntacnnaccctttaanncctcacaaacatcaagattnnagaggagtctcnnagnnctagaacttctatgacactgttggcttcaggaaaactgancacttcaaagcccattgctaaggacccctatttgccaaaattgtgatcttaagcangctgaccctnnnttttgcccatcgggactattaacaatac

SEQ ID NO: 1599 - DNA, 255 bp, Homo sapiens
cagactgagaaccaggcatgctcacggtacagacacaacacttgttgctcttccagaggaccttggcttgcttcccagcacccccatggagactcccaagcacctgtaattccagtcccaggagatccagtgccatctgccagaatttaagggtcgcaagcatacatctggtgcccctacacgcatgcaggcaacatactcatatacatacaataaatctaaaaataaagaatcagagaactggaaaaaaaaaaa

SEQ ID NO: 1600 - DNA, 255 bp, Homo sapiens
  misc_feature (1)...(255): n = A,T,C or G
agacttgagggcaggcancaggaacatgtctaatggntgggtggatatcaagaaaggagaatgctttcctccaaactgagcacagagccccgcatggtggtgcttgcctgtaatcctagcactcaggagacagaagcccgagaattcctataagtccgtaatcagtctggtctacacagtgacttccaagccaggactacatagagataccctagctcaaaaaagaccaatagaatacaatggaaaaaaacaaaa

SEQ ID NO: 1601 - DNA, 255 bp, Homo sapiens
  misc_feature (1)...(255): n = A,T,C or G
actgagatccgctccgactcttaaaccagnnnctcagccaccggagaaaaggcggagaaccattgaggattttaacaaattctgcagttttgtcttggcctatgctggttacatcccccctagcaaagaggaaagcgantggccagcctntggctctagctctncattgcgaggtgagagtgcagcacacagtgatggctgggactcggccccgtcggaccttcnaactatccagacttttgttaagaaagcaaa

SEQ ID NO: 1602 - DNA, 253 bp, Homo sapiens
  misc_feature (1)...(253): n = A,T,C or G
gactgaggtccttaatgagatgaacggttggaaganatgtcaaatatatttcagagctctggagttgagaatcaccctcccgaaccaaagtccccagcaggagggaatgaaaagtcaaaagacaaggaagaaccctgggaaatggtgatggacaagaaacacattcaagctgtgncggccgcccaattacaggcacccacctttaccagtaccgagtttttggaacatacacagatgtgactccccgacagtt

SEQ ID NO: 1603 - DNA, 253 bp, Homo sapiens
  misc_feature (1)...(253): n = A,T,C or G
ggcctgaggtatagcctgggcagaggccatcanttactctcttgctggaactctcaacggncggacaggaagcatgncatggtctccatatatctacngntggaggacggcgtcatggagngnggtantgnnaccagcagaaggccctgntgttcccttccaatgatggaggggaacataaaatgtcttcctgaagaccngcngagtgcaggnggggtggttataggaagaggaaagtgtgacaaaaaaaaaa

SEQ ID NO: 1604 - DNA, 252 bp, Homo sapiens
  misc_feature (1)...(252): n = A,T,C or G
aaagactgaggtgggtttagggctgaggncatagcctggncagaangccatanttacttcttgtgggaacttctctanaggatctgggacagggaagcancggcatgtgttcgcatacctanannagccanacacagaagcncctttctactggtaccagtagaattatncggcgggaatngggtgccctcccccttccttcataactggngtcgcaacaataaaatttgagccttgatcagaaaaaaaaaa

SEQ ID NO: 1605 - DNA, 252 bp, Homo sapiens
  misc_feature (1)...(252): n = A,T,C or G
gacttgaggatacaanttcttcaggtactngcttcagcaccntgtccacagtcntgttctctgccacgnggaaaatgaacttaaacctcaggacagnggagcggcacacctttaatcccatcactcaggaggtagaagagggtctccgtgagttcaaggctagcctggtctacaaagcaagttccaggacaaccagggcatattacacagagaaacaacnnaaacccaagaaataaaacaaacaaacaaaaa

SEQ ID NO: 1606 - DNA, 252 bp, Homo sapiens
  misc_feature (1)...(252): n = A,T,C or G
actctgatgaaccaatncaagatattnaagatcntggtatttccccaggcagggnttgagagtctcatatatncatgggcctccaatntgttaaggtatcnagaagatagaccantgaacttctaagtctcanggcctctaacntccaaagtgcgtggacngaaggngtggtacnagnngagctaagtgtttgatctttaancttacccagattcacttaccccttccctccctactgtataattaaaggtg

SEQ ID NO: 1607 - DNA, 247 bp, Homo sapiens
  misc_feature (1)...(247): n = A,T,C or G
gtactatacacctctaatcccangaaacaaaggcaangagatctctgtgtttaaggtcagcctgnaacaaaacaagtcccaaatccaggcatggaggaatacacctttaatctnaaccataccttctgctggagacctacataaggacattgnaagaaggaagattcactnttnttgncctgctngcatttacttgctggcacatcttttanaatctacttctacanaagacgagctaaaacaacta

SEQ ID NO: 1608 - DNA, 247 bp, Homo sapiens
cacgaaagtcacagatgaaaaccaagggaggctgcatctcgaggacttcttccctacagcaatgagactggctgagtgtctgattcaattaagcccaccctagtctggagagaacctacaccacacagcccagtgctgctctctggtccccgctgtaccctcaccagcactaatcacagacatgtcaccatgcccacgccacccgctcgcagaattaaaatcaaatacctactgttaaaaaaaaaaa

SEQ ID NO: 1609 - DNA, 246 bp, Homo sapiens
  misc_feature (1)...(246): n = A,T,C or G
catcccatacctgacaccccngggaatncctgccncatgaaaaacaccatacccaaccttactgnggcnatgcaccatacatccagagagtttgnggaccctcaaanatgntcctcctnnancangagccagaaacccggnaagaactgcatggagagaaagagacgggaaaaanngggggcggcgacagctggangtggngacagagctggaaatgtggnaccctctcnctgatcccaatgctca

SEQ ID NO: 1610 - DNA, 245 bp, Homo sapiens
  misc_feature (1)...(245): n = A,T,C or G
tgagaaatccaggttccacatccaganctacatgtacgangtggagagatggctagtggttaagagcagttgcctgctcttccctgagggccctgagttcagttctcgggacntcacagaggaaggcctgtagcctccagggagctctgccatctctggtctctgtaagtgcgcccactgatgtgcacatgcctcacccccatatgcacagaactaaccacaataaaaataaatcttaaaaaaaa

SEQ ID NO: 1611 - DNA, 244 bp, Homo sapiens
  misc_feature (1)...(244): n = A,T,C or G
agggcagcctggtcagngcnctgtttcttcttgtggaactctcnnaggtngggccggagaacacaacctgcaannntgnggcnnancatccactggntntgcnagaacgtgccccanttnaantccaacaacnacatggtgnntnacaaccatccgtaanaaagatctgacgccctcttctggagtgtctgaagacagctacagtgtacttacatataaataaataaatctttaaaaaaaaaaa

SEQ ID NO: 1612 - DNA, 244 bp, Homo sapiens
  misc_feature (1)...(244): n = A,T,C or G
caaagagaccaggagatcacaccnntcantgtatgccattgacttcctgactcatggccangactcgggtnctncnggatggtggataccctcctagacncacgaggagatcanggctgngaatgnnccatngtctatgangtctcncntcaggaccggtantgtgggatggcgacaccctctctatgacacacccanagatcaagccggcnatgaanatganctaagacatcaaccatagctg

SEQ ID NO: 1613 - DNA, 244 bp, Homo sapiens
  misc_feature (1)...(244): n = A,T,C or G
tgagacccatgccaactcatctgannagagacnacatgtgnggccttggcctgtnctgaacatganntgtgatgtgttgaatctctggnantcanaaaagcanccaaagaagacaaccatannantncatggatgtaaaccaggaggagcnaccttncanctntgccgngangctngcctgcncaagctgcttaccctgtgctccaggacaaggnccaagtgcatctgggaggctgagggtccc

SEQ ID NO: 1614 - DNA, 244 bp, Homo sapiens
  misc_feature (1)...(244): n = A,T,C or G
gactgagggagtggcattaggaggagtggncctgtnggagtaggtngtgtcacagngngtgtgggctttgatnccgtggnnctaactgcctggaaaccagtgttctcctagcaggccttcaggatgaagatgtagaactctcatctcttcttgcaccatgcnagcctggaccataccatgcntcctgccttgatgataaacctgtaatccagccacaagtaaagtttgtcctaataaaaaaaaa

SEQ ID NO: 1615 - DNA, 242 bp, Homo sapiens
  misc_feature (1)...(242): n = A,T,C or G
agaatgaggggaggagtngtagtcttcccctccccccgcctgaaacctganngntcggggtggagccctcnctgatcatttcgttctgccacgcccacntgctggaaccctgaggagccacacactgtgcacctnttctacctggaccaganattatttcggcgggaatcgggtcccctcccccttcctttcataactggtgtcacaacaataaaatttgagccttgatcagaaaaaaaaaa

SEQ ID NO: 1616 - DNA, 241 bp, Homo sapiens
  misc_feature (1)...(241): n = A,T,C or G
gactgagaaaggaggncggccagntcctcctgccttctggnnatgtangcattgcntnggnaagcattgntngagagatgtgctagngaaccagnnagtntgganggcctgctgtataactgtttcttccanaaaagccctaacaaagggatcnttaacgtttttttttctccttctacgttttccttgnaggctatcagcctttgtataatgaaatgtgagctntgctttgtttaaaaaa

SEQ ID NO: 1617 - DNA, 241 bp, Homo sapiens
  misc_feature (1)...(241): n = A,T,C or G
gacttgagaatctgctttctnttgacaaaactnttgagcttntgngcggcctcanacntgcntcggtctttannggtaccntacacnttccntgccctcctcttcttaccntacccacacagtaggacttcaaggaacagttccacagcattnctggtgatatgctatcttgccacagnccanaancaacaaggtgaatnaaccatggattaaaggctcnaaaaccatgagccaaaattaa

SEQ ID NO: 1618 - DNA, 239 bp, Homo sapiens
  misc_feature (1)...(239): n = A,T,C or G
gtgctctccgcctcctgcctacntgtttgaaatgtgaacatctcaacctctgctgctgtgncttcactctgccgctgtggactccnactctctgaaaatggattcangcangctgccatgcatggcattgntcacatggtcccactgggctctctgcctcctgcttgctgtgtgagatgtgagccctcacctgtttntgccagctgggcctttgtcctgccatcatggagtataggttt

SEQ ID NO: 1619 - DNA, 239 bp, Homo sapiens
  misc_feature (1)...(239): n = A,T,C or G
gagctgctgggacctgaacccgggacctngtggaagagcagacnancgctctcatccactgtagccatcttgctcagccncctttntttngttttnaataaccttaganggacaggntctnantatgtngcaaccattggcccttgcaatcatataaancttgaggaaacatctggagnacattgaaatatgcttcacaaagaaacataatgaataagcctgaagttaataaaaaaaaa

SEQ ID NO: 1620 - DNA, 239 bp, Homo sapiens
  misc_feature (1)...(239): n = A,T,C or G
catgtgctttccttagcatcttggggtnctctaangttctacctgggaaagaganactttgtaccgaatgctncgtcactcaccangcacgtgtgncgtaaatcacccggntaaagccaggaattncatntagncangnganagatgggganccccanggatgattttnccaaaacganaggcgancngcattgtntcntgcgaaaggtccaggcccntggtnaagaagggcttcaacg

SEQ ID NO: 1621 - DNA, 239 bp, Homo sapiens
  misc_feature (1)...(239): n = A,T,C or G
ggacacaggatgaaanatanttacatcaggattacagcctctacangangaccatgcnttnaacaactancctngngggactgaacanctactagatttttggacttcccgtccacagnngcncattgttggggagttganctgcancacatntgttgnaacatgtgngggaaatgttggggnacatttacatctacatgtatactcttacacacgtgcacaaacgggaacatgtacac

SEQ ID NO: 1622 - DNA, 237 bp, Homo sapiens
  misc_feature (1)...(237): n = A,T,C or G
gtgcgggcgtactcactcccngtantgcactncaggcctccggccttcnctgngtacntgaaaganancatacaccttcatganaagtaacttaattttcccagtgagtgctgganagatatcttagcaattaananatgcttgctgtttaatcatgaggacccaagttcagatcctagcacccatgtaaaaaacattcacctcacaaatgaaataatctttattcaaaaaaaaaaa

SEQ ID NO: 1623 - DNA, 237 bp, Homo sapiens
  misc_feature (1)...(237): n = A,T,C or G
aaactacagaagctggggactngaattatacctntancanngattgcctccaaatnacncacngacnagcctnattcaccagaacaaccatgaaccagtaaactgnnnttaggtctgcaggacacagcaaggaaacatcgagtgcttgacttttccttccagcccagccagggagacnngtcatccttgactcanaagagactcactaattaataaaggnggactcacaacttccat

SEQ ID NO: 1624 - DNA, 237 bp, Homo sapiens
  misc_feature (1)...(237): n = A,T,C or G
acttatgactctcccactgaaggccacctgcccacncntgtgactnngagngnnctnaccccccacaaggcttcatgttaaaatgcttagtcaccagggagtagaactcattgaaaggactttgaaagacgaggaggtatggcccttgttggngaaagtatatcacttgggcatgnctagagattttaagagcacatgtgcctctttgtctctccagaatggatcagggatgtaact

SEQ ID NO: 1625 - DNA, 236 bp, Homo sapiens
  misc_feature (1)...(236): n = A,T,C or G
gacttgagggaggagatgtagtctcccatacccnagcgctgagacctgnntgctcgggggggaganttctcngntncgtcgttctnacacagccccntgctgncgnctgaggagccacacacgtgcacctnntcnnctggaccagagacgtnttcggcgggaatcgggtcccctcccccttccttcataactggtgtcgcaacaataaaatttgagccttgatcagaaaaaaaaaa

SEQ ID NO: 1626 - DNA, 235 bp, Homo sapiens
gactgagagtcaagccccggtgaagattctgtgacggttcattgtataatttatgatgatgaagattgagttgcattttgcggaaaagagatgttgagatatctaaggcattgagaaatctgtcatgcagacatgcacacagggagagggagtacccaaactgatgagaacttacaggaattggaccatctaagcccttagaaagtgaagtccactgtgtctcaaacaaaggatg

SEQ ID NO: 1627 - DNA, 235 bp, Homo sapiens
  misc_feature (1)...(235): n = A,T,C or G
tgacccaagcagagatcatcactgaattcaattgcatanaccatctcaaggtgcccaatggactcataaacatgttngncctaaacttcatgncctctgngaaacaggggngatngagcctcattacaaaagccctaattgcaagcccgtntgcagnngaagacaaccccgaccancangaggaaactcancctnaggattccctcctgnctaccactgatggggccctacccac

SEQ ID NO: 1628 - DNA, 234 bp, Homo sapiens
  misc_feature (1)...(234): n = A,T,C or G
cagactgaggtggggtctttcagtctcacataatgaaaagccccttgaacctcagaatctgggaacgagacgtgctgtcgtcagctctacccactcacagcgaggcccacggaatcagcaagttcatcttcagttgggcagctgcttggcccgtcagcgtctgtcctcacctgctcttggntccacaccatgggccacaggcanaaccaggattggcctgaaaaagccagctgg

SEQ ID NO: 1629 - DNA, 234 bp, Homo sapiens
  misc_feature (1)...(234): n = A,T,C or G
aagtgaactagctgacttagantccttcctctttgcccttcagcagttcctacggtcttccagagcagcntttgccaggtntgagggaggcgtttcctttggtgcntggcgacctgcgcnccganccctcaggtgttctgcctgcctgcgccccacctccanccacngcngtggaangttttnatccttttcttttctttacataaacattaattttgtacattaaaaaaaaaa

SEQ ID NO: 1630 - DNA, 234 bp, Homo sapiens
  misc_feature (1)...(234): n = A,T,C or G
ttcgtcagggagggantgagacccctcttgaaagtcntattgacntttcttgaaggttntttttcagccagtttgtaaaataaactttacnttaatccttttctttcccccggactntgncattaaagcctttaaattttcaacaaattgtaacacatttatttaggaattanagttggatgtactttggtatattaaagtccatatgttttaagcccttatgtaaaatatgaa

SEQ ID NO: 1631 - DNA, 234 bp, Homo sapiens
  misc_feature (1)...(234): n = A,T,C or G
gaccttgaacatgggcggtgcctgtgagtgctggggaggacaacgatgagctcattgataacttgaaggaagcccagnacatccggacggacttagtagagcaggctttccgcgctattgaacaagcaanaaatgatcttgaagaatctanngaaaatgcatacnnagactnggcatggaaacatggaaatantcatctcatcagcgcccggtgcntntacctctggaggccga

SEQ ID NO: 1632 - DNA, 233 bp, Homo sapiens
  misc_feature (1)...(233): n = A,T,C or G
ttagtatcaaccacctgtcagggaagggnttgtnctctagcacaagccatgacagcttttgcagnctgcggagtgccacggtgcntgcggcncccttgtgctagatgagtccctgattnctgagcaaaccaaagnggaccacttctggggtctcgatnannatggggaccttaagggtgggaaattaaagctgccactcagggaaatggtgaactggcagcagaggtggcaaa

SEQ ID NO: 1633 - DNA, 232 bp, Homo sapiens
  misc_feature (1)...(232): n = A,T,C or G
gactgaggtggggtctttcaagctgtcatccagtctggtttagccgcgccaagacttggtcctccgcaagcatcaaggactggctctttcgctcatcttcctccccggaaccatgctttaagccagcttctcgctcccccgcttgccagtcttgtacagaagggtcccggtgcaggctccatgaatagttagagaagctttggatctacgtgnnaaaagggcggcctgttac

SEQ ID NO: 1634 - DNA, 232 bp, Homo sapiens
  misc_feature (1)...(232): n = A,T,C or G
aaccaatcaaacgttctagtctntcncgagtcctcctttctaagccnaatagtcnacagcangtnttcaaaatattttggatnntgatggatttttgtatggatttttttcctaagggtaataaaatgaggacgaatgcatgaacaaggcttatgaaaaataggacagaggtggctcancggntaagagcactgactgntctgccagaggtnccagagttcattcccagcaa

SEQ ID NO: 1635 - DNA, 232 bp, Homo sapiens
  misc_feature (1)...(232): n = A,T,C or G
acctgactacttgttcncggggggtagnctggngtacacggcctcagcgagtccgtagnccncgcnngcttcntctggagntccctgngttcccttccccgccnccccactggtggcctccccnccctctgtaantgggntccngntacacctcttctggtgtgtctgannncagccacagtgtgctcctntacataaataaataaataaataaatctttaaaaagaaaaaa

SEQ ID NO: 1636 - DNA, 232 bp, Homo sapiens
  misc_feature (1)...(232): n = A,T,C or G
atcaatcacactgcagggcaggccctatnctcaagatatttgtctaacatcaaananaactcagctgantggatgngctttgctctganctacccctgccccnntanagggtnnctntganaagccctggttgtcctggaacactctctgtagaccaggctgtcctcgaactcacagagatctgtctgcttctgcttcctaagtgtgagattaaagacacgcgtcaccacca

SEQ ID NO: 1637 - DNA, 232 bp, Homo sapiens
  misc_feature (1)...(232): n = A,T,C or G
gaactgagggaggagaagtacacctcccctcccccaccctgaaacctcgctngcncnnggngnggagntccntgatcattcnnnctgnnacgccnactgcctggaacctgaatgagccacacactnncccctttctantggaccaganantattcacgtgggaatcgggncccctnccccttccttcataacgtggggncgcaacantataatttgagccttgatcatgaag

SEQ ID NO: 1638 - DNA, 232 bp, Homo sapiens
  misc_feature (1)...(232): n = A,T,C or G
ctcatctcacaccatgtnaacacaganatgacggtcctaaccagnaacagaaaagaggacatgccaggcatggtggncacagntgccncagccggcaggcaaagacaaggtttgaaaacccttgaccatgctgtgcttagaggcagctttgatgctaagcttttatttacttttctgtcagtcnaactttttggatatgtaggnttgccttctgacattaacttagggggag

SEQ ID NO: 1639 - DNA, 232 bp, Homo sapiens
  misc_feature (1)...(232): n = A,T,C or G
gactgagttgctactgtgattcgtcagcatgggccacaggcatggggctggagagatggctcactgttttaagagcactggctgccgctcttgcanaggaccaaccagtgttcaattcccagcacagacatggaagctcacaacggtctgcaacatccagttccagggaatctgacaccctcacacagacatacatgcaggcaaaacactaatatacataaataaaaataaa

SEQ ID NO: 1640 - DNA, 230 bp, Homo sapiens
  misc_feature (1)...(230): n = A,T,C or G
gactgagggaggagatgtagtctnccctcccccaacctgancctgcttgctcggggcggagcnnnctgctaactcnntntaccacgcccnctgantggaactctgangagccacacacgtgcacctttctactggaccaagagantatctcgggctgngaatcggnncctctcccctctttcttcataanctagggtngngagnaataaaatttgagccttgatcactag

SEQ ID NO: 1641 - DNA, 229 bp, Homo sapiens
  misc_feature (1)...(229): n = A,T,C or G
actgagagcagcatgancgcccgggtattctcccagctgcaatcacggngtntgtttcctgaggaggaggaggaggcanaangtgaanagttgngcnattactactaggtccagatctctgctttgcangtgtgggcntgtggacagagccctgtatccttgntgtctataaagcccggagaagactggaaaangcgagcagggnccttacatggattgttttaaggct

SEQ ID NO: 1642 - DNA, 229 bp, Homo sapiens
  misc_feature (1)...(229): n = A,T,C or G
ctgattgaagggaattaggctaccaagcaagtncctttctccaaaggccggttacgtggaactcagctgntcaaaccccataaaggaaaggcagttcgnttgntgaagggtagaagacagaaacaaggtnagnagcaagagcctangcctggncacaaatgcatccnaagccgnaagaggccagacccctnttgaggagggcntccctntntccagtccaaagagtacc

SEQ ID NO: 1643 - DNA, 227 bp, Homo sapiens
  misc_feature (1)...(227): n = A,T,C or G
ctccacaggtgtacctgagagacttntgtacacacacacanataaataantaaggcanggccacgtggtaggcgggagtgcacctttnnatctcannnntttangggnnananacagcagttcaaggccctcctggtntacatagtgagttccaggccanccagggctacacagtacaaccctgtcttgcaaacaaacnaaccatcaaataaataaataaaacaaaa

SEQ ID NO: 1644 - DNA, 227 bp, Homo sapiens
  misc_feature (1)...(227): n = A,T,C or G
atatctggcgaagaggaaggnggccccccaagtatagcacctgggagccagagnagcacatcngggancntngccnttgncctcccctncttcgatcggtcaacctcttttgttcagtacagggtaacgttgaagctaatttgaacctacntggatatctgactggagccgcaganncangatcttgnattgttcnttacntgaaacacagcatggaattaacatta

SEQ ID NO: 1645 - DNA, 227 bp, Homo sapiens
  misc_feature (1)...(227): n = A,T,C or G
gggcccgacctgaagccagggacctctggcactccttnnctgngctgtcttctggccttgncacacctgnntgccgtgctcacaatcttccanngcancaaggnanagccattcgtatngcanatncccnanaanatcancgtantactctaanatncgtgaggacatgaaatagccttaccaattgcacccggtaataccaatactctaaaaattacatcactaaa

SEQ ID NO: 1646 - DNA, 226 bp, Homo sapiens
  misc_feature (1)...(226): n = A,T,C or G
agatattgacacagttactttggaagtataacngcattgttcgctttnaanaatctcttactnacaacgtnaacngngacttaanggttgactacaacttnattctnggngggggctagncagcgccggcccntctgaacaancnggggnnaggcntgnnctctgagatgaggatggagcctaantgggtgccactccttaaggaaccnatcttaacagaaatata

SEQ ID NO: 1647 - DNA, 226 bp, Homo sapiens
  misc_feature (1)...(226): n = A,T,C or G
taccatatataggaagcctngatgaatngagccgnccantggggcatccggaacgcgctcnttaanacgcacactctgngaaattacacnatcntctcttgccttcctgcatagagcgtgagatnnanangctccgtgaacagtggcgcacctccgtgaaagagaaggggacggagtcnnaancacccanataatgannttttntttataaagagcaaaaagcttg

SEQ ID NO: 1648 - DNA, 225 bp, Homo sapiens
  misc_feature (1)...(225): n = A,T,C or G
ggacgtttaggtgacttcagcaacacagctttcctctttgccaganaagcggggttgccntctttctcaagcgctcgaagagnntcgggaagcntggagaaaggaaaattttccaagtaaataatacccaaacaaaagaagtagaaaatttaaaaagtgcaccanaacaaaggaataaggaattataaactagttttaattatatcancaggaagattttcaaat

SEQ ID NO: 1649 - DNA, 224 bp, Homo sapiens
  misc_feature (1)...(224): n = A,T,C or G
cctcccttgcatccaaggcatatttcctggagaggccaagggcacttggatacttgctgactacatactttccgctccaggccaaagtctggaaccatcatcatctgaatggacagngacagatcagcctatgacattttcatgtgggtttatgttataaaaagccaatccaaaagagcnngacgtgatgaaganagaggantgcanaaaccaaatttgagacc

SEQ ID NO: 1650 - DNA, 223 bp, Homo sapiens
  misc_feature (1)...(223): n = A,T,C or G
actgaaaatggaggggcatgaggccatggaacggcgtgaaaatgttagcacgtgntcaaaaggaaanattcntatcatnttgaggagccgggatgagttanntantanncaagatcggcagnggtcntgaanggttatgaagagaaactnaatgngnttttnnntcactcatgncatacngcaacagaacttgttngaatgcccggccaaaaaaacatcaatg

SEQ ID NO: 1651 - DNA, 223 bp, Homo sapiens
  misc_feature (1)...(223): n = A,T,C or G
gactgaggattcagggtatggaaatgganaggttcctgangaanagaaggtccagcgacaggcccanagagggatccagctcaagaggaggttccaaggnctgacactactactgagggtttggagtgctcacaaaaanggacctatcatgactgtnctncaaaagacccaacaagcagntgaaaaagtcactaagcatttatttgcacccaaccaatggaca

SEQ ID NO: 1652 - DNA, 222 bp, Homo sapiens
  misc_feature (1)...(222): n = A,T,C or G
tgcaatttccattaatngcatagtgcnagctnnaannccaggnctacaccatatcacgcggnntcctgggacttacagngctctggtgaccnccntgggcaccaatctacatgtggggcnaagatgcangcaaaacactcntgttcatgcagaaaccncctgntcccaccaagagttcttacccaccaaccngaatagatntgnttcatattttctcctcaa

SEQ ID NO: 1653 - DNA, 221 bp, Homo sapiens
  misc_feature (1)...(221): n = A,T,C or G
acagctacccctcccctagcctcatanctnnttgntngnggtgnagcgtatnctgctcattcagtgtntaccacagcccactgatgnancctgaggagccacacacnnngcaccgtttctacatggaccagagattattnggcgggaatcgggtcccctcccccttccttcataactagngtcgcaacaatnaantttganccttgatcagaaaaaaaaaa

SEQ ID NO: 1654 - DNA, 221 bp, Homo sapiens
  misc_feature (1)...(221): n = A,T,C or G
gaagggacgagaaaatggatttgagggctgtcatgattgaaatccagtntcancacaggntggattgnnngacaccnaatnnnttgannnccanggaagggattgaaggnanacanactcttcacnatatgacgattatgaccgatntagacactctggaanccggagttatgaaaggagaanatngaggagtcgctcctttgattataactataggagat

SEQ ID NO: 1655 - DNA, 221 bp, Homo sapiens
tgcgatgcggtggccattgtgtacttggatatgcatgaccgtatccaaggccacatgcacttaggattttggtgtgttgtgggacccatacttcctttctagattctctgaaagggggtgccgccccctccctaaggcccatcctcttcccttaactctctcatctccatgacaactgggagcttgtagagcaaaagagacttcgaatcagaaaaaaaaaa

SEQ ID NO: 1656 - DNA, 220 bp, Homo sapiens
  misc_feature (1)...(220): n = A,T,C or G
ccctctggaaggggggggttttaaggttccctttnggccttttngggggaaaaaatttaagggcctttactaaagggggggcctttngaaanccnaagctccgggttngggaaaatttgggnaaaccaaacaaaaatttggaaccangggnattttccttttnntncgntnggattcancctggttaaaaaaccaaacctttngggctttttcctttttt

SEQ ID NO: 1657 - DNA, 219 bp, Homo sapiens
  misc_feature (1)...(219): n = A,T,C or G
gactgagggaggagatgtagttctcccntnccccagcctganacctgcttgctngggggggancttcntgctcatncnactctgccacncccacgtgctngaacntgnngagccacacacgtgcacctttntactggaccagtanattattcggagnnaancggcccccctccccctnncttgataacgtgagggcgcaacnataaaatttgagccttg

SEQ ID NO: 1658 - DNA, 219 bp, Homo sapiens
  misc_feature (1)...(219): n = A,T,C or G
ttgagggcaggaaagnannctccccttcccccagcctgaacctgcttgctcgaggtgnagcttactgctnngncgntntngcacgcccactgctgnaacctgagganccacacacgtgcaccnntctactggaccaganattattcggcgnaaatccgggtcccctcccccttncttcataactggtgggacaacactaaaatttgagccttgatcaga

SEQ ID NO: 1659 - DNA, 219 bp, Homo sapiens
  misc_feature (1)...(219): n = A,T,C or G
gactgagattagtggagtacctctgntccaccatgaccaggtgggctagagttactacttcaaatagtaagcgacccctgtcagcaacatcatgggaggacatgaagaaggggtctgtggagagagcagaccaaagccttccaaatcgtaagcagtgtcaaagcagtaggctgccccttagaaatgactcacctcaagcaaaacgcaaaaagaacaaaa

SEQ ID NO: 1660 - DNA, 218 bp, Homo sapiens
  misc_feature (1)...(218): n = A,T,C or G
agggagagggcatgtccatgcctgggcnttggtggaggaggaccggaannnaattcntaggngccgnatggctgntntnaaccgtccaagattttagtnnacaggaattgggcgccctctnntggcctntgctggcactngcaccanaagtaccctnangagcccctggggctgacagnacagttccctgtctgatctgggagtatgggaggaaagaa

SEQ ID NO: 1661 - DNA, 218 bp, Homo sapiens
  misc_feature (1)...(218): n = A,T,C or G
agactgagcccgagatgaccaacaanttccttctgaaacngccgccacctgttctntccngcaagnngntggccatgcgtgagagcaccacagccntgcccatccatccccgccntccgaggtttcacntccctctaactcctgctcttcttttctgccttcacntccactctcctcccaccctgataaaccttgttcttagatctgaaaaaaaaaaa

SEQ ID NO: 1662 - DNA, 218 bp, Homo sapiens
  misc_feature (1)...(218): n = A,T,C or G
gactgagtgcaagatgtacacattgttcttgtttcttaccaatntgccttcnctctgccnttgtggacngtggccctctggaacnnttaagcccaantaaatcccntcnntggacaagttgncttgntcatgttgttgtatcacagaaacaaaagaatgtaaccaatacaaccacctgtataaaataaaggtctaactacacattcacaaaaaaaaaa

SEQ ID NO: 1663 - DNA, 217 bp, Homo sapiens
  misc_feature (1)...(217): n = A,T,C or G
tcacggcaatgaacattntgtgatgatgatggggggacagaanggactagcgtgtgacacactgngacacaccgnanctnccacgttgngcagngnantnagaaagctaanggctacttggagtggtcaagtccaaagccagtttgggctatgtagagaattncagaccagtcagagcgacacagtgagatccaggctcattacaactctgaccacc

SEQ ID NO: 1664 - DNA, 217 bp, Homo sapiens
  misc_feature (1)...(217): n = A,T,C or G
taaccatgatggctgacactagaccgcgtaagtatagacagctatcaagatggacagcaaggtnaggccctgacttagtctgcatcctgacaaccgccaggcgacctgacagtgaattcagacagcactctgagcactctgtggctgtttagcctccaggagcttgcagatcctactttaaatacattagacatccattactatcagaaaaaaaaaa

SEQ ID NO: 1665 - DNA, 217 bp, Homo sapiens
  misc_feature (1)...(217): n = A,T,C or G
agactgagtcatgacaggtgcagcaaccacgcccgctccntcactactacatgaacagcaacaccagcgtcccctgaaccagagtcacactgtcttgaacctcttgtactcctggctccactgcctagatgcggccgaccctgtagcaggtgctcaggtgcacacaggcgcagcacgaatgaataaaatgaatgaaagaacctgcacaaaaaaaaaa

SEQ ID NO: 1666 - DNA, 217 bp, Homo sapiens
  misc_feature (1)...(217): n = A,T,C or G
aatagagcgtcctgttacnagcagaggatcngatgctaaaattacntttccaggttgtttcacnaatngttgctgtagtnatccattaagtaacccaggnnaactggaagagaacnacgccnttgntgtgaatcgagcancaaagcggcgcttgaaanccgagttgggaatacccttggaagangttgatntaaatgaaatggattatctaacaaga

SEQ ID NO: 1667 - DNA, 216 bp, Homo sapiens
  misc_feature (1)...(216): n = A,T,C or G
cccccctgccagctacagtgcgcntcctnatnngatntcctctgacagtgagnccctctgaagccaacctgatttgtgncaannacttncacatnggacaaaaaatcctgggagngtcatgactgtnacanctttgaccaccacagccaccantgacangatnnanagcgattctgantctgacaagagcagtgatcacagtggcctgaagcggaa

SEQ ID NO: 1668 - DNA, 216 bp, Homo sapiens
  misc_feature (1)...(216): n = A,T,C or G
agactgaggtgaccagaatggagctgtggcccggggcctggacggtgctgctgctggcggntgntttgccattggctacctnaggctgngctttcgctggngnncctggttnggcttcggcatnagnctgagctttngctgccacagctgccttnggcttcngggnctggggggttncttcctctgagctnganctcgagccctaaaaatcctggc

SEQ ID NO: 1669 - DNA, 216 bp, Homo sapiens
  misc_feature (1)...(216): n = A,T,C or G
gactgaggtgtttttgctgtggagtggggtcttgtgaggattccaagagtctccccagaagatactgagntcttgatgtannatcatattggctcctgcagcctnnagnctgcctggangatgncntgctcctnnnttgntgataatggactggacctctgaacctgtaagccagccccaattaaatgttgtcctttgtaaatttgaaaaaaaaaa

SEQ ID NO: 1670 - DNA, 216 bp, Homo sapiens
  misc_feature (1)...(216): n = A,T,C or G
tcagacgaagatgtagaactatcagctcctnntgcnncatacctgcntggatgcctgccatgttcccacnttgatgataatgaaccgaacntcngaacctggaagccagccccaattaaangttgnccattataagagaangggaaangaatcnttcgagnngnggcccgcggncnaggacatncgcgcaaacctagggggggttgaaaataccga

SEQ ID NO: 1671 - DNA, 215 bp, Homo sapiens
  misc_feature (1)...(215): n = A,T,C or G
gaactgaggtgcgagtggaccgtccgngctggaccnccgcccgctctatncatcccgagcggtcaaaagncccccgttcgagaggggtgncgtgccccccctattggagtccnanncgagaggctcgaggttgcgttantcttgcagctggnggggntctggnnatccactccttntcccacggaaatgatctgcaactgttaaataaagcattt

SEQ ID NO: 1672 - DNA, 215 bp, Homo sapiens
  misc_feature (1)...(215): n = A,T,C or G
gggcttgtatgagtangtgctcatncaatncgtatagcacgtgacctgctctnnntaaggnnccgagtgcgaattccagncagnccacntggatggnntcacanccatncatattgagatctnacgccctcttctagtgctgncatgaagacaactacagtgtacttacatatgatacntaantctttttaaaaatgtaccgctagaaccatgag

SEQ ID NO: 1673 - DNA, 215 bp, Homo sapiens
  misc_feature (1)...(215): n = A,T,C or G
aggactgacgtatagccnggccagaggccatantnactnggttggggaacttcnnagaggattggacaggaaacagccnatangctngnaacnntgangagccacacacgngcgcngtttctacgtggaccagagattattcngcagggaatcgggtcccctcccccttccttcataactngtgtcagcaacaataaaatttgagccttgatcag

SEQ ID NO: 1674 - DNA, 215 bp, Homo sapiens
  misc_feature (1)...(215): n = A,T,C or G
agactgagtattggctggcacccgcaaaaacccttgcagnncacanggagctgngcaacactggacctccnnnnacctttgtnntttggtnntaanntcttntgctgaagcgccatgtanactcaaagaagaaataaccacggtatacgnacttgacctttatntttgaataactgcanccagnatgaanggctgtattaaaagtggattaaagg

SEQ ID NO: 1675 - DNA, 214 bp, Homo sapiens
  misc_feature (1)...(214): n = A,T,C or G
ggtgttcccccaggttnttttttggtttncccaaaaaaactttaaccttaaggtttggggaaaaggnaaanggtgccccttcccctncntttccccnttnnttgcaatttnccccccannaattccttgggccttttttcccccgggnncttggggggancccnccccaaaaccctaattttngggggggggtttcnntttaaaaaggaaaaaa

SEQ ID NO: 1676 - DNA, 213 bp, Homo sapiens
  misc_feature (1)...(213): n = A,T,C or G
gttgctttggtgtacaccacattggctgaacaattcctgacactcctggtggtgcctgctatcgaaaaagactatggttaccagactgatttcacccaagtatggaacactacaatggaagagttgcattgctgtggctttaacaactacacagattttaatgcctcacgtttcgtcaaanagaataaagtcttccccccaccctgttgtgcc

SEQ ID NO: 1677 - DNA, 212 bp, Homo sapiens
  misc_feature (1)...(212): n = A,T,C or G
tcatgagtacatagaanagcttaataaaccacatttnatantanctgatcctgncttttcagaatancngaaatagnnaatccctgtnttgtatacccaacacctaccnngcanaacagaatcatatnattccacaatattaccacattaatcaagtnnggtgntcaaccaaagaaattttgagacattangatctttaattttttttttat

SEQ ID NO: 1678 - DNA, 212 bp, Homo sapiens
  misc_feature (1)...(212): n = A,T,C or G
caaaggaagccctgcgannccccaactnagccacggagccgntggngtcagcgcganccccaacctcanccacgangccaccgcagcaanggctcgctgtcatttcanangtcgttgagcgccaagcccttgccattcttaggcatgcaatccgggaaagccaggcacacagtaggtgttcaataaatgctaaaagcaccgaaaaaaaaaaa

SEQ ID NO: 1679 - DNA, 212 bp, Homo sapiens
  misc_feature (1)...(212): n = A,T,C or G
cttcctggcccgctttccgaacacttntgggacctgggagctgtccctnntcnggccagacccccngncccctgattnctagntccgcacntggtctcgnngccgtggcggacgggccggcancggccccccggngaggcggtggcctgcagatganngttgntggggcntgtaaccttcagcctctaacaagttcttgtggccttttctga

SEQ ID NO: 1680 - DNA, 212 bp, Homo sapiens
  misc_feature (1)...(212): n = A,T,C or G
agacttgaaaaaggtctcggggcttggcgngntggctctgtggttangncgtgccgantgctcttccganggtcccgngttcaantcccagcaaccacnnggtggcctcacaaccatccctnantgaaatctgntgcccntcttctggagtgtctgaagacagctacagtgtactaacatataataaataaataaatctttaaaaaaaaaaa

SEQ ID NO: 1681 - DNA, 211 bp, Homo sapiens
  misc_feature (1)...(211): n = A,T,C or G
tctgccccagcagctcagganganggagtctcgnatntttggaggtgagtgaacactctganncangtacgctanttatnncctacanattacatagtanctnangagnccatgtagtacctgatactaagcccanagcccntgcattcatncttgaggggcagntactgttggcanaaacgcattaaacaaatcctctcctcttcaaaaa

SEQ ID NO: 1682 - DNA, 211 bp, Homo sapiens
  misc_feature (1)...(211): n = A,T,C or G
tgaagctcctgcctctgncgttcttgcaataatggaccanacctggaattgtgaatcacataaaccttntcttcccctgtgttgctttnggccaagatattntattactgctacngaaatgaaactagaaaagatctccaggttngccggactctgaggtcttttnctncagctcaaataaattactntccagttcccttaaaaaaaaaaa

SEQ ID NO: 1683 - DNA, 211 bp, Homo sapiens
  misc_feature (1)...(211): n = A,T,C or G
tgttcgtatacctgcccntttgnataactngacgcgctttgggcaccttctcgtncatncaacgactncannctttctttgcagncccttncccaaaacccttggaaaccttaaaaggacncaatggctctaccaagaatcctntggnacttngncacnacactgaggctactgangcattcatnttgggtagaatggaacagctaccagt

SEQ ID NO: 1684 - DNA, 211 bp, Homo sapiens
  misc_feature (1)...(211): n = A,T,C or G
ctggtctacaaacgtantgttccaggancgccagtgctgtnacacaagananncccatgtntnanatantanacnntaaacancaagtaacccacagaaacaaaangcaanaagatctcgtgcggagtttgaggtcagcctggtctacaaagtaggttccaggagagccagtgctgttacacagagaaaccctgtctcaaataaaaacaaa

SEQ ID NO: 1685 - DNA, 211 bp, Homo sapiens
  misc_feature (1)...(211): n = A,T,C or G
agacctttcatagaancgtcatttgctncacctaaaaggggacanatnnatttnagattatncagnggctctnctcacctgccttaccctgtttctggtctgtgacaggtattcatganggatgggaacnctnntttatccttganagctgtngtananttctcaaggangacacaanagaggatttgtaaatgagacacctggtacaaga

SEQ ID NO: 1686 - DNA, 211 bp, Homo sapiens
  misc_feature (1)...(211): n = A,T,C or G
aacctgtgtatcggctcctaactaaatcaaaatgtttgaaatcagaagatcatgatcgaacnacactttgngctgnnagctgtgnctactgngtanactncttncnttacaggngagggactgncaggatgcgttncctggngtgagcnttcccctcanccgacaagactntntacaagcttggtgtttgcaataaagtaatgcgttaagg

SEQ ID NO: 1687 - DNA, 210 bp, Homo sapiens
gactgagagctgagctctttgcctggcctggacacctccctcacaaagggtgttgggattcagctgaggtaaccatcagatcctgtgatgtcctgagactccccgtggcctgagactccccgtggcctggctgaagtcctgctggataggcagctgtaggaaggggcattgcagagccgagacaaaaggcaagagaaaaaaatacaccgg

SEQ ID NO: 1688 - DNA, 210 bp, Homo sapiens
  misc_feature (1)...(210): n = A,T,C or G
gaaaggcagacaggaangaccnactccctgnttcctagcacaggcacacagttactccaaagtcaaagtcccccccactgctngagcccagnggggaaggaacaaaaacatggctgaatagactactcagcaagncaaggctttncannanaacctaacaacaagagctctatccctgggncccacacacnagaagaagagggagagcca

SEQ ID NO: 1689 - DNA, 210 bp, Homo sapiens
gactgagggctgtctctagacctgggggacgcaccccagttccaacacctgctgtcctgggactggcttctacttcagagccaccagcacatcgtgcctaagcatttttcgtttttttaaaggagaataaaggaacattagttttcagattttttttttaaatgtagacaaaagttagcaagaacgaggccttccgtgtctttttttttt

SEQ ID NO: 1690 - DNA, 209 bp, Homo sapiens
gactgaggagcgggatgagtcagctatggcactgaaaagcccacgggagtgatgactcagggaagctgcgtctctggaggtgcctacaagactccaaagcagctcatctgggcagggtacctcctcctcagccttcgctgttgcatgtataatcttaaggaagggtgtgtgtgtgtatctttaaagtttcagcttctgaaaaaaaaaaa

SEQ ID NO: 1691 - DNA, 209 bp, Homo sapiens
  misc_feature (1)...(209): n = A,T,C or G
gactgagggaggagatgtaatntgccntgccctagcctgaaaccngcttgctcaggggtgganctntctgctcattcgntctggcancgcccangtgcatgnaacctgaggagccacacacagtgcacctttctactgnancagagattattcgngcagggaatgggggaccactnccccttccttcataanatggtgtcagaacaata

SEQ ID NO: 1692 - DNA, 209 bp, Homo sapiens
  misc_feature (1)...(209): n = A,T,C or G
actgaggggacgaaggccntccttgaggaagatggaggggttccacatggctgctcgagccaccatcgcanaggaggcagccgtggcttgtcgaaagtcttctatgnccacatgntgctggatgnggncatgagatcctccgctaaaaggcaataggggcttgagagaancccatgatggaacctaccantgtttccagaaaaaaaaaa

SEQ ID NO: 1693 - DNA, 208 bp, Homo sapiens
  misc_feature (1)...(208): n = A,T,C or G
cgactgacacctgactacatgaattactggatnggcagatttgnnctatattnagcacngaaatttgntctttatnagaangaattacaattaatattanagtgnatgtcgcacaccntncgagaatggntgcgtngtgncgccaacagcanagagagttactgagctgcgttactgnccngantagcccaggatgaagaggaggagg

SEQ ID NO: 1694 - DNA, 208 bp, Homo sapiens
  misc_feature (1)...(208): n = A,T,C or G
gactgaggtaaatcaacattctcgaggcggnccagcgatgtacatccccgcccccctagagcacacaggtggctgctgttatctccattctcaagacattccagcacgtggccttcagtctgatttagaaattaggtttaccaagagggctagaaaagtagatatttctatattaataaaggttggtttttattttgaaaaaaaaaaa

SEQ ID NO: 1695 - DNA, 538 bp, Homo sapiens
  misc_feature (1)...(538): n = A,T,C or G
agacttgagggctaggaagctnctcngcccncaagacccangacgcntacnttttggagggacacntggggtggctcngcggtcaagcggangcgctactacagcagacaggcaggcgcctgggcagcccggaccttctttctaaaacaccatggcttgnatactgctgctgctgctgctgctgcctgcgcatggccacataggcatgagtctttgcgttcaggttctactttnncaactcagactannctggnatnctaannaantctntnatntaancatcngaaaangccgganattacaggtgtganctgcccttctnagnctgactagaagtnntcattaaagaaagcanaggaggcagagctctcaaaagtgaagaagacnggctgcaggctacaaannatcngaggtgntgctagcacccaggncanacanntcaaaactgcctatgnctcctgctccagagaatccagtgcctctgnctggcacgncngacacccggactcangtgcacatncccacacacaaacacatg

SEQ ID NO: 1696 - DNA, 207 bp, Homo sapiens
  misc_feature (1)...(207): n = A,T,C or G
aactgagaatggtgcttttggccctggnntgacgcggcctgntggaggcaggggangagcgcgctctcgcgcntttgccaagcctgtntgcnccnanacggtgctcctgaacggaaagaantttctggcggacctcttcntcttcntgcagaagacnangcnanccaanctgctggaattgacatgcangtgcctttcattatttct

SEQ ID NO: 1697 - DNA, 207 bp, Homo sapiens
  misc_feature (1)...(207): n = A,T,C or G
gtgaagtccccttgttgcctaagcttgntgacctgagttccatccctnggacacacaaggtagcanganaaaaagcagattcccagagttgtcttctaaccttcatacaccagctccccaaatanatgtgatataaataaattttaaaaggaaaatggcgaggggtgccatcaacattatntggtttaaaataaaaggaaactgtgc

SEQ ID NO: 1698 - DNA, 207 bp, Homo sapiens
  misc_feature (1)...(207): n = A,T,C or G
ccagtggtaaaaaggcctnttctctgacngaaggccgnaanatgnannngtncaaggaggtaacagccagcgtgtgtnaagttgacaataatcaacaggacagtgagagaccctgttccaagggtggagagggatanaccangacaccccatatctcctttgaccntcacangttgtccacaanncacatacactttcttcaaacat

SEQ ID NO: 1699 - DNA, 206 bp, Homo sapiens
  misc_feature (1)...(206): n = A,T,C or G
agacttgagtcatgannggtgcagcaaccacgccccgctcnntcattngtannggancagcancaccagcgtccncntganccagagtcacacctgtcttgaacctcttgtacctcctggctccacctgcccangatgcggccgaccntgtagcaggtgctcaggtgcacacaggcgcagcacgaatgaataaaatgaatgaaaga

SEQ ID NO: 1700 - DNA, 204 bp, Homo sapiens
  misc_feature (1)...(204): n = A,T,C or G
agtctttgctgggaatatagtccctaaacttgtctttggggaactactttgactcgtctttagagtagtatgtatagggctcgtgagatgatttaacaggtaaaagtcacctgagggcctgagattgattcccaggacccacactgatctccgtacacatgctgngtaactggtgtgcacccatacacatgtatacacccataa

SEQ ID NO: 1701 - DNA, 204 bp, Homo sapiens
  misc_feature (1)...(204): n = A,T,C or G
tagcctgggcagaggccanattnacttgttggggnactctctnaggnctcgacaggaagcanggcatggntccatatatgtactgcctcnantctgntgaattnctagctngncacccgggnnatcgaaggttcctatncggaagctcctattttctacaaaagtanaggaaccttctcgacctgcaggcatgctggccagagg

SEQ ID NO: 1702 - DNA, 204 bp, Homo sapiens
  misc_feature (1)...(204): n = A,T,C or G
agactgaggttattttatggctggcgaggaggctnaacaggtaagggcacctggagacaagcctgatgacctgagttccagcctnaaggccagnatggaggacggacagcgccgcctncaacttgncctttggctctacacaaacacacacaccataacatgtacattccacacacataccctacacacatacaaaaaaataaa

SEQ ID NO: 1703 - DNA, 203 bp, Homo sapiens
  misc_feature (1)...(203): n = A,T,C or G
gataacgggaggagccgcanncctgnttgtgggatttgcngtgctccagngnnnactngaactcagagatgatccctgtcntantcttatgngattnatagtgcactatgccacaagatnatccatgccaagatccagttcagaaaccttgnatcgnnccagcgcctccngatcacngatcacacggcttggacatggctggc

SEQ ID NO: 1704 - DNA, 203 bp, Homo sapiens
  misc_feature (1)...(203): n = A,T,C or G
gactgagattcttggctacagaaganacacacagaattggccctctcctgccttgctatgcacagctggagcaaaatgctgtagatgggcaagagaagaaagttcaaccctgcctaaccaagtaactagacctggaagcagcaactgggcatccctgggtccctcctctgaataaagctgacctctcattggaaaaaaaaaaa

SEQ ID NO: 1705 - DNA, 202 bp, Homo sapiens
  misc_feature (1)...(202): n = A,T,C or G
gtcgtcgtcacggtgggagtaggcttaanantctcacccnagttgcctggaannaagtcntncactatcaggcanttggatgangactnaacaactctnatntntgcactgctgccatgacannctgnatgctngccatgcatcccaccttgacgataatggactgaacctctgaacctgtaagctagccccaattaaatgt

SEQ ID NO: 1706 - DNA, 202 bp, Homo sapiens
  misc_feature (1)...(202): n = A,T,C or G
atgaacatattcattaaaaggatggaagagcnanncgangantggaaggagccgcatccacaccnacnngnganaaacacatacccatactacacaaaagtnnagtgacaccaccaccaggcgtgactcctggcctttgngggtgngggttggnggctggtgtcgcaacaataaaatttgagccttgatcagaaaaaaaaaa

SEQ ID NO: 1707 - DNA, 202 bp, Homo sapiens
  misc_feature (1)...(202): n = A,T,C or G
ttcggagacgcctgcaccttgcttggaggccccggcctcngcaggatcccgccccctcanaggccgctgcccctcggagcccgctctncttcggggggacctttcctacggatgacactgctacatccgtgtgttccccgagcccctcagngctgcaccccctcctctttgngttcctctnactaaaagagacctggcagag

SEQ ID NO: 1708 - DNA, 202 bp, Homo sapiens
  misc_feature (1)...(202): n = A,T,C or G
gaccctctccgttgcnagcaatctcaagancctccaaacctctttccnntgctnacntggantgtccacactggnttctgctttcttntcgaataccttccctaaagcattctcaaacacaaaacaacagtatctggttctaagtacagggataagctctttaaacctaaaataaaaccaaaccaaaccaaaccaaaaaaaa

SEQ ID NO: 1709 - DNA, 202 bp, Homo sapiens
aagactgaggtcttgtctcagcttgtgcctctgcctcagctgacatcattctgccaatcagcccaagtcagcaaaagcagcaaaaaactgcagcacaccactagaagttttttggtgcatttctctctatggagtcctgaaaaatgcaactcaacctacgcaatgcaaggtggaccaatacaagcgtgttgtcagcaaagaa

SEQ ID NO: 1710 - DNA, 201 bp, Homo sapiens
  misc_feature (1)...(201): n = A,T,C or G
gactgagaaaatgtaaatgtttgaagccagggcgaagtggtatatgcctttaatcccaggactcaggaggcaatggcaggtgaatatctgagttcaagancatcctgttctatgaaatgagttccaggacagccagttctacccagagaaattctgtctctaaaagccaataaataaaaccctgtctctaaaaaaacaaaa

SEQ ID NO: 1711 - DNA, 201 bp, Homo sapiens
  misc_feature (1)...(201): n = A,T,C or G
acagactgagttatttttggctggcaagatggctcancaggtaagggcacctggaganaagcctgatganctgagttccagcctcaaggccagcatggtggacggacagcacgcctccaacttgtcctttggcctacacaaacacacacaccataacatgtacattccacacacatacctacacacatacaaaaaaataaa

SEQ ID NO: 1712 - DNA, 201 bp, Homo sapiens
  misc_feature (1)...(201): n = A,T,C or G
tatttgcctgcaacgctcgacctntgcttacctncaccttactncangaaggccantccccacatgcatatnccactgaagaataaagagtctattgaaggnancttaaaaggaantangngnganggggaangggcctcccctcttctttataaagcatgttcgctgacattaaaggtgaacctgatcagaaaaaaaaaa

SEQ ID NO: 1713 - DNA, 201 bp, Homo sapiens
  misc_feature (1)...(201): n = A,T,C or G
actgatccagagactgctggcncagnaagaagcttaccttctntgnaatntgaagccntagcaagcanngccttntgacctcacagaacaccatggcttcttagaagagcactgccagnnagtctgcgcttggggggaaangatgaacatgtatancgtgcntccatttgactaacccagnctacattgtgaaaactaaca

SEQ ID NO: 1714 - DNA, 201 bp, Homo sapiens
  misc_feature (1)...(201): n = A,T,C or G
gaggcttttctgcaggctaccagaaaggtcaggggggcactcggcaggaaggctggcccggggcagctgcaggggctggggggtgggcaagatcagatgcctctgtgtcagcccatgcaggacagccacaaatgcccctgtccacaggngcaccccgagcaaccctagggctcaggcaagacagcagccctgttgaattta

SEQ ID NO: 1715 - DNA, 259 bp, Homo sapiens
actgagagagaaatgcaccaaacaacctctggttgggttccagctgcttcttgctgcttctgtggactcgtgcctattggtggagccttgaagtttcttcccgatcaagctgccactgttgattcatgataaggtttctctgcgtaaccctggctgtcctggaacttgtagagcagacttgtctcgattttcagagatccacctgtctctgcctcctaaactatgggattaaaggcctgtaccacttcaaaaaaaaaaa

SEQ ID NO: 1716 - DNA, 201 bp, Homo sapiens
  misc_feature (1)...(201): n = A,T,C or G
gactgagtttaattggttggggccagnaaaggaagaggcgtgactatcaagccaacaatagatgatgaatgagatgatacattnggatgaaaccaggaattttttcataacagtcttagagatattttcaaatctaaaaagtaggacatctaaagaaggaaataaatttcacagcttattattatattagtaaaaaaaaaa

SEQ ID NO: 1717 - DNA, 200 bp, Homo sapiens
  misc_feature (1)...(200): n = A,T,C or G
cccagggttttctccgcnggcgaggcnntgcggnggccgtaaccgctnntgcggncccnctccgtgttacctggaaaaantaaaacctgtgaacgncnctggaggcntgngcagatgcncctgccggttggnagngngcncctggttttgctacttagaaagcatagtaaaattgataatttggtctatcaaaaaaaaaa

SEQ ID NO: 1718 - DNA, 200 bp, Homo sapiens
  misc_feature (1)...(200): n = A,T,C or G
ttaattccgtaatgcctancccctcgcatatgcccacctcaccaataanctgctgtaccttgttcaacaatcatgtatctacaatcatcattcttanaggatccantnaatccaccanntccctcatcatatncatctcttatttcattnntatntcntcatacncgttatccctttgatatcatccttcacctccctct

SEQ ID NO: 1719 - DNA, 200 bp, Homo sapiens
  misc_feature (1)...(200): n = A,T,C or G
tctgaacttcagcttccttcatcataccatnacttgtggntnnttttttggnaaaggatccccttgttacagtcatttgagcatctagacagaatatccacccataancctcactcaantacggnnnnnnanagggccctagccaacccatttgcagtncttctntagnccttaataggaanaattttgacggaaccatg

SEQ ID NO: 1720 - DNA, 200 bp, Homo sapiens
  misc_feature (1)...(200): n = A,T,C or G
actgagggactgaatagggagtctgtgcaagtcactgcttgggtctcctcttcttcctcacctcntaaagtggcactcagtagttccccaggtcaccttccaacccactgacttctgagtgttggctctctacagagacaattttatccaacaatttccttccaaattttaataaaaatcaatgacttcaaaaaaaaaaa

SEQ ID NO: 1721 - DNA, 199 bp, Homo sapiens
  misc_feature (1)...(199): n = A,T,C or G
acctgaaactgcttactcaggggtggagcttgccgctcaatcgttctgccacgcccactgctgnagcttgccgctttgctgtttcgaagccatcacngtgttcacctgcaaccttactcctanattatttggcggnaatcggcccctcccccttccttcataacggagtgctggaatagtaaaaattgaaccttgagca

SEQ ID NO: 1722 - DNA, 199 bp, Homo sapiens
  misc_feature (1)...(199): n = A,T,C or G
caggaatgagaaggaacggctccccctttctgaatcagcatggattgctgtttctaccttcccgcagtcgtacatctgccaaccggattttccaaatcaaacaggaagaagggatggatatggcaattagagaagcaatgcatgagagggacatgcatactgcaatgcanatagtcggagtacggaacaatgtctaaat

SEQ ID NO: 1723 - DNA, 198 bp, Homo sapiens
gactgaggcttggctcccgcagaggctatccccaagcctcagcagcttgcctgaggagtctgtctcagctcgcatccactctgccaatcagcatgagtccgcagaaggggagagaaaccacagcacaccaccagaaggtttctttctgtggagtctcaataaatgcagcctcaacctagacaaccgtaaaaaaaaaaa

SEQ ID NO: 1724 - DNA, 198 bp, Homo sapiens
  misc_feature (1)...(198): n = A,T,C or G
accctgaagcctgcttgctcgnggnggagcttnctgatcattcgtnctgacacgcccactgcatggaacctgaggagccacacncntccacctttctactggaccagagantattcggcagggaatcagggtcccctgccccttccttcataacctggtgnngcaacaataaaatttgagccttgatcattaaaaaaa

SEQ ID NO: 1725 - DNA, 198 bp, Homo sapiens
  misc_feature (1)...(198): n = A,T,C or G
gactgaggtaccctttgagcaagctatgatcactggtgcccagcagacaggctctcagcgccaggtgtcagaggggagtaagtccttccttcctttcctatggtgttcccactgaaaatgtgtgacctgaatccgctgggatgaatattgnggggcttgccctctacaataaaaacgtcaacatgaaagataaaaaaa

SEQ ID NO: 1726 - DNA, 197 bp, Homo sapiens
  misc_feature (1)...(197): n = A,T,C or G
cgtctgtgatccaactgtgcnccaanagcntagngtcaccagtcctntgaagannggcaacaacatgaaaggggaaaagccaagtaatgcaacggagaggggcctctgagaacaagagggaatgcacaactgttgaaatcctttgtaaaaaaccttgtattcttagaaatataaaaagacctcatggaggggctgga

SEQ ID NO: 1727 - DNA, 197 bp, Homo sapiens
  misc_feature (1)...(197): n = A,T,C or G
ctgcagctgcgtgagtcatatnngntggttgctatgggaatgaacctgctgcccaanangatnaagntcaccccncaaagaaanantgctgaacaggtccaccttcccccatatcttaataacttttctcttccacctatctctgctgggtggngggctanaggaggttgaaaccttattaaaagcaggttgcaaac

SEQ ID NO: 1728 - DNA, 196 bp, Homo sapiens
  misc_feature (1)...(196): n = A,T,C or G
gactgagccgctggaggccgtgggtcctgggcagctcaagtgcagccccgtggngaaattcatctagcaagcactactgtgagggccnnaacnngcngngggatgggnacctgacagtgnaaaccatcactcgtttggtcaagatatngcttgcaccngntcnagcacctntncccggaacatgccatgacacctt

SEQ ID NO: 1729 - DNA, 196 bp, Homo sapiens
  misc_feature (1)...(196): n = A,T,C or G
tatttcctgagagttaaaggaanacagagtccctgcncctcgctntcgctggcagnnttcaaatcagctttacccctcgagtgttcccaacagcacttcannaatcccaaactcgcacnataggaggattttctanntcacnanncatantcacaaccaccccntgatcactanccntcctcagctactttaactt

SEQ ID NO: 1730 - DNA, 196 bp, Homo sapiens
  misc_feature (1)...(196): n = A,T,C or G
gaaacatcatgggagtgaggtcacttttcctcagctgcncantgaacgtncatacgttcatcatacacgganacccaaggngntcagtcatggccagancttgtcatgaantgngaccacgngggtaacntatnntttgtagtaccntnaccagncccaacagtgtgncattaantngagggccctctgatgttaa

SEQ ID NO: 1731 - DNA, 195 bp, Homo sapiens
  misc_feature (1)...(195): n = A,T,C or G
gactgagggcacctactacaggtgaagaagcttagaactgataacctgagacctgggannctnaagatggaaggaacngactccnaaggactgtnctgtacctacacatgcatgctgtggcttgcatatccccctcccccaccacacncaaaataaacaaatgtaacaactttttcaagaattcaaaaaaaaaaa

SEQ ID NO: 1732 - DNA, 195 bp, Homo sapiens
  misc_feature (1)...(195): n = A,T,C or G
tcttgccattaggaacctgnnttcaatttccctgcatccacncngtggnatcacnnccntgctgtggtgggatncaatgcactcttctggtgtntcctgtagaagtgacagtgtactcacatgcntgaataatnaacttaatttttaaaaaaacgaaggacccccaagaaagaaagaaagagaaaaagagaaaaa

SEQ ID NO: 1733 - DNA, 194 bp, Homo sapiens
  misc_feature (1)...(194): n = A,T,C or G
gcaccaagcaatgcangtacnacttcaccgcccgtgagantgactntttcaaacacacnactaaatgaagatcattctcaaactaactttcttctaggtgattagncananaaagnngtngntnttgttctcaaantaantntnttctaggtgattagncaaataaagttgttgttgttgttgaaaaaaaaaaa

SEQ ID NO: 1734 - DNA, 194 bp, Homo sapiens
  misc_feature (1)...(194): n = A,T,C or G
gggggctgagtaaaggcntcantngtttaagagccggcgactgccnnttccagaagttctgagttcagttccctngcaaccncctggtggcctcacanccctctgttctgggattggcgtgtcctcttctggtgtgtttgaagagagtgtacttgcatacattaaataaataaataaataaatctttgaataaa

SEQ ID NO: 1735 - DNA, 194 bp, Homo sapiens
  misc_feature (1)...(194): n = A,T,C or G
agaacttgaggttgcaggnaattgctttgaagcctatggcacntgctaccacgtgccaccgaagcgcggntgngcagagggcccctgcagcaccacctgcaaatgtgcaatgccttctgggtttcntggtnttttgtttgttttgtttttcgtttntaaagaatttataagaatttttgcatttcacctttgaa

SEQ ID NO: 1736 - DNA, 194 bp, Homo sapiens
  misc_feature (1)...(194): n = A,T,C or G
gactgagggaggagaagtagtntcccctnccccancctgaaacctgcttgctcggggtggagcttcctgctaattcaacnctgccacgcccactgctgngacctgangagccacacacnagcacctttctactggaccnganattnttcggctgggaatcagggtcccctcccccttccttcataacctggtgt

SEQ ID NO: 1737 - DNA, 194 bp, Homo sapiens
  misc_feature (1)...(194): n = A,T,C or G
tccacgcctacagcagcaagagacgaaagnctnttntngctattgttgaatacgaactaaaggagaatgagaatgtgacagacagacaaacggaacccagcagggggagctcgaggagcagactgtgttaatataaaaagttagatacttggaagaaataaaactgctaataaaatattttatataaaaaaaaa

SEQ ID NO: 1738 - DNA, 194 bp, Homo sapiens
  misc_feature (1)...(194): n = A,T,C or G
gatattttaatagaagacccgnagtaaggggaggantnnttanccataccccatagacangatncantgtgtgttcatttgaggaatacaaanatattcnagaatatgatcgngcgtgctgaatgggaaatctgagttnatangncggctctanagatacangaacantgttntaagacaggagggggtcttca

SEQ ID NO: 1739 - DNA, 193 bp, Homo sapiens
actgacgctggaatcttctctgggagctgagtccatgctccgatcctgagaaactcagcttaaatcccccaggagtcttcacagaggaaggctttatggcaactcctgggtagggttaagttggggcttgttttacagtttttcaaaatgaaactatattgtttagagatattgggtggaggccggcggagtc

SEQ ID NO: 1740 - DNA, 192 bp, Homo sapiens
  misc_feature (1)...(192): n = A,T,C or G
aggctgaaaacaaaggaaaccgaccccaannatcgngatagttcccnaggacggncacaggatgggccaacaagcaaggaccagcnnagacccagagagttccaggtgtgacggcctntcaaccgccggagtcgnagcacgcagccgggtttncagaaaatctgtctcncaatttgcaaaaacccctgtctt

SEQ ID NO: 1741 - DNA, 192 bp, Homo sapiens
  misc_feature (1)...(192): n = A,T,C or G
ttttaaatgtcctggngctggngagatggctcaccagtgatgaacactanntcttcttctanaggacccagctgctgttnccagcnttcacacanncctctgtaactccagccccagaagatcttntggcctnttctggagnnacttgggtactgcncagacatactnaaggcaanacactttatacaaata

SEQ ID NO: 1742 - DNA, 192 bp, Homo sapiens
  misc_feature (1)...(192): n = A,T,C or G
gactgaggttcccccagngtggatgcaccctcctcctggctgcctgcaaaggagactctcttgctgctgccttgggatcaagatgaagaactcagctccttcaccagcatgatgtctgcccggatgctgccatgttgatgatggactgaacctctgaaactgtaagccaacccaattaaatgatatccttgt

SEQ ID NO: 1743 - DNA, 191 bp, Homo sapiens
  misc_feature (1)...(191): n = A,T,C or G
actgagcttggagggccangcgcgtcctttggcggctttgggaaccatcctgagcgtggcanaggcccccgccctganctgtcgccttcgccgcccnncacctggaggcagagcangcggancaggangtcaaggtcagcctctacatangtttctggaaaatgtgagancctgcctcaaacaaacaaaaa

SEQ ID NO: 1744 - DNA, 191 bp, Homo sapiens
  misc_feature (1)...(191): n = A,T,C or G
gactgagatttctcgtttcttgggngtcaacagtcacaaagtagaaaaaacaatagagggaatntatgaaaanttcaccatncattctgatctcaacaaagctgctagttggaagagattaactaaggagttcctaaatgcatctcttcccagcacagagaaaataaagacagatgcacattattccatac

SEQ ID NO: 1745 - DNA, 191 bp, Homo sapiens
  misc_feature (1)...(191): n = A,T,C or G
agactgagatggtttgaaattctccttgccctgatcctgcggagaggagcgaggtagaggtgcgcgactgatcagntaattgggtaagacttcccacagagacacagcagatgacaaactgccctgtgcttgcttttcagagttaaaaatttaccttaataaattaaacagaaatacctgaaaaaaaaaaa

SEQ ID NO: 1746 - DNA, 191 bp, Homo sapiens
  misc_feature (1)...(191): n = A,T,C or G
gactgagtacactgcagctgtcttccaacacacaccaaaagtgtgcatcggattccaaaggcaccatgtgattcctggnaattgaactcangacctctgcaanaaaagtcaatgctnttaactgctgatccatctcttcanaccttcacaatgattattaaatgtttattaaatgtgttactaaacattaa

SEQ ID NO: 1747 - DNA, 191 bp, Homo sapiens
attgagacacactgagctaaaaggacagtgagaactacgtagaaagacaccatctcaggcctggagagatggctcagcgtttaagagcactgatggctcttccaaaggtcctgagttcaatttccagcaaccacagggtgactcacaacaaagacagctacagtttactcatataaataaaataaatgaat

SEQ ID NO: 1748 - DNA, 190 bp, Homo sapiens
  misc_feature (1)...(190): n = A,T,C or G
gaccccgcgacgtggcagcantgctggcncganccggggatcgcggtgggagncgcgacccnngaggagtctccttcnaagttggcgtctngcngcancntcctcctgcganctgcagcccgggaaccccatattccgatatatacagctttattacaaaataaaatctgtaaaatcttaaaaaaaaaaa

SEQ ID NO: 1749 - DNA, 190 bp, Homo sapiens
  misc_feature (1)...(190): n = A,T,C or G
acttgaggtacagtagatatgacacggggacgtcggnggngtnantttctccgcttagtntntggcancgcccgaanggctccggcaccataagcgtccctcctcttctgnntcagttatcaactatggtttggaaatatgtaatgtaaaattccagaaaaacacaatccctacattttaaaaaaaaaaa

SEQ ID NO: 1750 - DNA, 190 bp, Homo sapiens
  misc_feature (1)...(190): n = A,T,C or G
ttccatgaggactgctgacaggacctgaatggcctcnctttagctatttctgtgtgtggagctnttgcttgctcctctcagttctgatccctggtgcgacagtggctcctgagcaccatgaaagttgtcccagagaagaatgctgtacagaatcctctggggccgagaaaaaaacatacaaacaaaaaaa

SEQ ID NO: 1751 - DNA, 188 bp, Homo sapiens
  misc_feature (1)...(188): n = A,T,C or G
ctgaacatataagaggagcngatnactggcatctgatatcactagaggccgantnnctaaaggagtgtggcaggacgnngtgtgtccatgaaatggcttanaancccaggccagnatgtgnaatgannctnccagcgtatttgtaaaatatattcattaaagtctctgctctgagaaaaaaaatagaa

SEQ ID NO: 1752 - DNA, 186 bp, Homo sapiens
  misc_feature (1)...(186): n = A,T,C or G
agactgagggtggcgcctgtcnaccactgaaaaagangataaatttggaggctggtnctcatgttccaccccggtgccgtgccgagcaatccggttgcacatttgcaaggcaagcatgctttcntgctggcatnnnctatatctntgnatnntaaggaaaacatcatttgcatacaaacaaaacaa

SEQ ID NO: 1753 - DNA, 186 bp, Homo sapiens
  misc_feature (1)...(186): n = A,T,C or G
tagctggctaagtagccancgntgtccttggaggagncggcctcangagagccantttcntcgcntgcagtcagtgtacaggccacgggancacagtcctcttcgtccntacaaaaaaganctcccctcttgcctcttnttttgactactgctaacccccaaataaatacaatctggaaagtaaaa

SEQ ID NO: 1754 - DNA, 186 bp, Homo sapiens
  misc_feature (1)...(186): n = A,T,C or G
tgagcgagtgacgacttcaacctgggcgacgccctggaggaccccaacatgaagccaacccccaaggccccaacgcccaagaagccgtcaggaggcttcgacctggaggacgccctgcccggcggcggcggaagnggngcnagagnganncnnttnnaccaggccccagccggacccgaagccgcc

SEQ ID NO: 1755 - DNA, 186 bp, Homo sapiens
  misc_feature (1)...(186): n = A,T,C or G
tttaaggccacgcgttgggcagcagagtaaagcgtccaacttcanacctaacantgagagtnctcctggntntggaaganggcctggcaggntgggcatgagggcccanntgncaaggctggctaacagaggctggcatggctctcacctcagtgatgaacaggatgcactggagaaaaaaaataa

SEQ ID NO: 1756 - DNA, 185 bp, Homo sapiens
  misc_feature (1)...(185): n = A,T,C or G
gactgaggaacaaatgttgcagcagagcanaaaagcctagcatgacttcagaactttaatnacacatttcttctcggaatttcgngnggattaagaatcccagnncgtnctcagaaatctgcctgacnctgncanaccnagagcgtgggatttaatgggtgtntgccatcacggcccctgcccta

SEQ ID NO: 1757 - DNA, 184 bp, Homo sapiens
  misc_feature (1)...(184): n = A,T,C or G
acatcatctccccgttgagtntanctacctctggcgaccnctccngcaacaggcgacaanggtggcagcgttgctcnnntccagcgggancaagcgantanaggccgngcctcacttctangggagngtacaatgnttacngtaccctttcatagtnatgagccanagtgcagacctctttgaa

SEQ ID NO: 1758 - DNA, 184 bp, Homo sapiens
  misc_feature (1)...(184): n = A,T,C or G
ctctgctggtgtggcgccgttctgtcntgtntccagcagngggcgcnttctgcnntctntcngancntcaagangcttcaagtgtagcanaccntgaganacntgggctacccttttgaagnggagaganngcagtctttcagttcaataattaaaggtctctttaaaaagccaaaaaaaaaaa

SEQ ID NO: 1759 - DNA, 183 bp, Homo sapiens
  misc_feature (1)...(183): n = A,T,C or G
gactgaggtgctggtagagatggctcagtggttaagagtgctggctgttcttcaaaaggacctgggttcgatttccatcacccacanggcagcgttaccaccatctgtaacnccagctncaggagttctgacaccttcacatagatgcatatgcaggcaaaacacaaatgaaaataaaataaa

SEQ ID NO: 1760 - DNA, 182 bp, Homo sapiens
  misc_feature (1)...(182): n = A,T,C or G
tgcaggacagtggtcancaggaaggcccagcagcntccancctccctgagtggcaggccatcttcggangcagccttttntgtgcntcagatcnttcaggcaaacntntcaaatcccnttannannagcanntttctaggantgccccttttaaacaatttgtgaaacaaaaataggaaacc

SEQ ID NO: 1761 - DNA, 182 bp, Homo sapiens
  misc_feature (1)...(182): n = A,T,C or G
cactcagagcacgccntgtaggncacgcatcccncagganngccgagcagcantgtngaaacctancagagcgttcggcgcncttgcaatnccaagncttggngacttatgacctnnaanagcgcnctgcgcctagcatagaaggaatcctgaagtaggctggatcgtgaaggacaatcccc

SEQ ID NO: 1762 - DNA, 181 bp, Homo sapiens
  misc_feature (1)...(181): n = A,T,C or G
acagaggacttggcgctgcagtgccttcttctcttgngcagggnagcngaaggacaccgtgcttcgntatcaccatgtnccgagagnncggggnagagancgcttanaagaaangagtggggagacaggaanggnttntttatgaagaatgnggangtttttttaggggagagaaatttta

SEQ ID NO: 1763 - DNA, 181 bp, Homo sapiens
  misc_feature (1)...(181): n = A,T,C or G
gaatgggctgcccaccagtccacnccacagactccttgcanctctggtttgtgaggntggcnctgctgntcgangttnggccttttccacaatgctgagatggagtntgaaccctttggaaatctgnatcanncanacctatactataaatactacccacacntngtacccaagacccagt

SEQ ID NO: 1764 - DNA, 181 bp, Homo sapiens
  misc_feature (1)...(181): n = A,T,C or G
ctactctgcatattacncttnaaaagcagtaacaacgtgancttccacccctctgcctctnctctgcaagaacagcaagtgctcttaacctgntaanaatggnncnttttcnttagagtgcgccgcagcagcacacagcagcattcanagcatgaatactacattcctgcggcgggggggg

SEQ ID NO: 1765 - DNA, 181 bp, Homo sapiens
  misc_feature (1)...(181): n = A,T,C or G
cctagggtcttgcacctgcctcatnacacnccttaacccgtaggcatanaatcccagccttggagaataccnaacccanaacatncacccgttatttatngnaccgtaaaggaaatcannacnttccacaggaatgatgnnattgatctgtgttctttcaccacaatacactggaaataga

SEQ ID NO: 1766 - DNA, 180 bp, Homo sapiens
  misc_feature (1)...(180): n = A,T,C or G
gactgagggtgaaggaagagaganggaaagaaagaaagaaggaaagaaagaaaganagaaagaaagaangaaaggaaggaaggaaggaagaaagaaagaaagaaagaaagaaagaaagaaagaaagaaagaaagaaagaaagagggacccaggttggtgagagaaatggctcagctcaga

SEQ ID NO: 1767 - DNA, 180 bp, Homo sapiens
  misc_feature (1)...(180): n = A,T,C or G
actgaggtggggtctttnccatcttggcctcgccagtggctgctgtggggaggatgtgccgcctcctggcagggggaagaaggaggagaagatgaanaagtaccggcggnccttggccctggtctcctgcctctctctctgctctctagtctggcttccaagttggcatgtttgctgtaa

SEQ ID NO: 1768 - DNA, 180 bp, Homo sapiens
  misc_feature (1)...(180): n = A,T,C or G
aatttgagctttgatcagtaccaaaaagacnnacnnacnggggtacacaaggtgcgcgtgtcngcctnaggccgccaggacggagcgattctcacggaggaaggagcacgccaacagggcctgactgcgtacagacatgtccccctcaataaaattgcagttgaaatggaaaaaaaaaaa

SEQ ID NO: 1769 - DNA, 180 bp, Homo sapiens
  misc_feature (1)...(180): n = A,T,C or G
aggtggtggttcagcagcgtaagaacanttgctgctctngcnganggcntgnggnnagtgcccagngcccaccttgggagggtcaccacctgnacngcaacgnccagctnccggngacntggcatntctagccaccggaggcaccctgttataccccttacacagacacatacatggaca

SEQ ID NO: 1770 - DNA, 179 bp, Homo sapiens
  misc_feature (1)...(179): n = A,T,C or G
tcgggggggagcttctctgcngattcgacnnnnacacagcgncanngctgnnactctgaagagccanacactgtgcaccatttctacctggacccgagattattcggcgggaatcgggtcccctcccccttccttcataactngtgtcgcaacaataaaatttgagccttgatcagaaa

SEQ ID NO: 1771 - DNA, 178 bp, Homo sapiens
  misc_feature (1)...(178): n = A,T,C or G
agactgaggtataagtattgtttaaactgcatcaatggcagcacatacagggagnttgtaagacnatcagnaanggccttnggactcacagangcggtgtcatganggctnccagntgnatctcccctaccattgttcagcancnttggcntatcaangccggtgcctcagatgatgg

SEQ ID NO: 1772 - DNA, 178 bp, Homo sapiens
  misc_feature (1)...(178): n = A,T,C or G
tgtttgtcacattgtgtgnntgtgtactatatgantntanncccnatgnatgccanaanagggctgtagatancctggagctgtaattacangagggtggtgagctttnattngngtgctagaaattgaacccagatcttctgtaagagcatgcaatgggtctcacctccttaaacat

SEQ ID NO: 1773 - DNA, 178 bp, Homo sapiens
  misc_feature (1)...(178): n = A,T,C or G
gcgctcctcctggctgcctgcancggagactctcttgntgctgccttgggatcnagatgaggangccngcgtccttccgnccgcacgatgtcctgcncagganacctgccnctgcctgctgcaggancagcaccctctgaaacctgtaanccaacccaattaaatgatatccttgtaa

SEQ ID NO: 1774 - DNA, 176 bp, Homo sapiens
  misc_feature (1)...(176): n = A,T,C or G
gactgagaatctaccatgagaagcctntgaataacananatatcaagccgtctnatgactgccttcagtcancatacctggcaggtaaagcacacatgtccatganaagaggactccatgangtttgtgaactatttgtgaaangaaggtacttttatgtttttaatagtgagata

SEQ ID NO: 1775 - DNA, 176 bp, Homo sapiens
  misc_feature (1)...(176): n = A,T,C or G
ttgagctgtgcttcgggcggtccntgangaangaagatggacctgcttgncagngcctccagtngcaagtgcnttggctgcagcctgctcaacagggccatggccagtgaggagantaagggaggcggagaaagttggagtcaaacantaaaganccttgaacaccaaaaaaaaaa

SEQ ID NO: 1776 - DNA, 176 bp, Homo sapiens
  misc_feature (1)...(176): n = A,T,C or G
ccggacaggaggatggcgtggtncgntatgcccggccnnccccggaaacgggganccgngcccacttntnnnnngttcttaaggggatggatagggtttgaactcagagatctgtgtactttgcctctgcctcttgagtactggcattaaaggcatgaactaccaccttagaaaaa

SEQ ID NO: 1777 - DNA, 175 bp, Homo sapiens
gaaagcaggcagtgtcctcggacccgtaaagtttgtgttactgaaggtgggacactcaactcctgtgcagacaaggagctcaacaggaatggtatcagacttctctcttcagaatgtgacagccagagactcgggggaatacagctgtgtttactatcaggcaaaggctacttaa

SEQ ID NO: 1778 - DNA, 173 bp, Homo sapiens
  misc_feature (1)...(173): n = A,T,C or G
tttggccttggggaatgtaannccttgggtttgggagngccttttccangggggnannccattggcccccatttccaaagggggannaaccttaaaaangggggggaggcccatttttaaaaggagngnacncttaattggaaaaaattggaaaaaggggcccttttgggtaa

SEQ ID NO: 1779 - DNA, 173 bp, Homo sapiens
  misc_feature (1)...(173): n = A,T,C or G
gaacaggtgcccttagccncaggaggagacatatactccagncacccctggatncatttctttttnagcattctaggggctggnnagatggctncaaggttaagagcactgactgtgcttncanaggtcctgagntcatttctcagcaaccaccatgggggctcacaaccatc

SEQ ID NO: 1780 - DNA, 173 bp, Homo sapiens
  misc_feature (1)...(173): n = A,T,C or G
tggatcaggggaggatgccttgncagaacataactngaaggagncttgttctccttntaccatgngggtnccaaggatggaactcaggttgtcagcnatggcagcaagcacctngtnccccctganacttgcngagagcccggatttaccctttaagatatccaattcagggg

SEQ ID NO: 1781 - DNA, 171 bp, Homo sapiens
  misc_feature (1)...(171): n = A,T,C or G
cggcctccgtgggcatgataatcggangccgcgantccnctgngttcnangagagtgatgcctcnnacgagngagntctgcnacttggctgtcgnggtccctgcggttgttgaancgtaganccctttgggagtttccttaccagcatctccaacacagccaacattagta

SEQ ID NO: 1782 - DNA, 171 bp, Homo sapiens
  misc_feature (1)...(171): n = A,T,C or G
ctgcacgggccccgcgtacannaagacagccctggaaggaggaaccttngtcagancccctnaanctntgntntnntganagangggcatgancanatgtcaaaaggnngcctctctcctccttcactgtccacagtaaacacccgaagctgtgtctcctaaaaaaaaaaa

SEQ ID NO: 1783 - DNA, 171 bp, Homo sapiens
  misc_feature (1)...(171): n = A,T,C or G
tcttccaacacacaccaaaaccgtgcatcgnattccaaaggcaccatgtgattcctgggaattgaactcaggacctctgcannaaaagtcaatgctcttaacngcatgatccatctcttcanaccttcacaatgattattaaangtttattaaatggttacgtaaacatta

SEQ ID NO: 1784 - DNA, 171 bp, Homo sapiens
  misc_feature (1)...(171): n = A,T,C or G
gactgagggaggagatgnagtactcccctcccccagcctgnncctgctngctcggngaggagcttgctgctcnttcgtctctaccacgcccacgtggtgnaacctgangagccacacacagngcaccttnntactggnccagagattattcggagggaatcggcctcccct

SEQ ID NO: 1785 - DNA, 170 bp, Homo sapiens
gcgtaagggacctaaaagaactgcccaagaagagtattgctttctaagaggaaatttatggtgcctacagtgacttgcgggaaacggcactagagccaaagaagactcaggccattcagctccgttttacaaataaagcaacagatgctggatgcccatagaaaaaaaaa

SEQ ID NO: 1786 - DNA, 170 bp, Homo sapiens
  misc_feature (1)...(170): n = A,T,C or G
acctgacacccaccaangctctngatncctcttgggcaccatcagacacctnggagaggagcancnncctntntttaagcaatacatccctgtgccnacacaaaggtcatgctgatcancanacatcgnttgggctatgagcagccaangtgcagggggccagaagggct

SEQ ID NO: 1787 - DNA, 170 bp, Homo sapiens
  misc_feature (1)...(170): n = A,T,C or G
ccatactcatcttttggtaccttctgacttggtattngacatgctgattatactgnttgatctagaaaccatacctttaaaagccnnngncctcagaaattattntcngtnattaangnncccactgntttctgntttcacanntattcgctatcattccacttttataa

SEQ ID NO: 1788 - DNA, 170 bp, Homo sapiens
  misc_feature (1)...(170): n = A,T,C or G
ggctgtgttaccgtacttggaaanctttccntcgcttttggctttggtttggagaagcaggacacagntnncacangacccagtctgaaagactgnaggtnggcagncggggctgacatntgntntacagcnatcannatggttcccaccagctctgcagacctctaaag

SEQ ID NO: 1789 - DNA, 169 bp, Homo sapiens
  misc_feature (1)...(169): n = A,T,C or G
ctaaatgaactgtgctaaaatacttgtgtatattcgaagttgataactgtggaaaacttcccttttcttttgttacctatattgggcaaaataatgtgttttgttgtgacancanngagnaganaacgttagttaacacatcatcccctttccttaaccacttggtacc

SEQ ID NO: 1790 - DNA, 169 bp, Homo sapiens
agctggctgaggtgggagagttcgatccatccaaggagcgcctgctagagtattcccgccgctgcttcctggcactggacgacgagactctcaagaaggtgcaggctctcaagaagagcaagctgctcctgcccatcacctaccgcttcaagcggtgatgccgccgccc

SEQ ID NO: 1791 - DNA, 169 bp, Homo sapiens
gactgagtaacttcaggtagaacatagttctgtcgttaaaaagtcatgctagtgtgacatgatgtgctcccggacagttcccatgtgctctgaaagatcggcctgtcatggcctggaagtgtctaatattcaaagaacccagaggactctaattaacctgggggggggg

SEQ ID NO: 1792 - DNA, 169 bp, Homo sapiens
  misc_feature (1)...(169): n = A,T,C or G
tattttacaacctgagaaccanggcatggctcccagagcctntgctctcctgcccagagccaagcctttcttcttgntgctgtacttcacggattttactgcaggcctaggagctgttaaagtcagctaaaacaatgaatgaagataacaggctgactgcagacccccg

SEQ ID NO: 1793 - DNA, 168 bp, Homo sapiens
  misc_feature (1)...(168): n = A,T,C or G
tgggcacacggtgcatctcaataaacancanccaactgtactgagtgaagggtcatttntntntnaatggggcccattagaatgattcatgcncagnttcttttctagcccaaaggcanaccatgncatctttaggcacaanagcnataaanagctgccctcccccct

SEQ ID NO: 1794 - DNA, 168 bp, Homo sapiens
  misc_feature (1)...(168): n = A,T,C or G
gactgagggaagtgaaacangtgcgcttaagagccttgntttnattacattnactgtggctttcctgtggacgtccnaagacnncgcacggaagtccgtnctctccttccatnacgtggganantgaaccataggtatcacggcntnggtggcaagcaaaacaccttg

SEQ ID NO: 1795 - DNA, 168 bp, Homo sapiens
  misc_feature (1)...(168): n = A,T,C or G
ggcgagcacagtagtgggttaaagggngtccntgatganttggnaatnngatctacngatgcacgnagtgatnganannttctatggggccgngtganaactacatatgatgaatgctcatttgtaacaagactatgaatanatgcttcanatgtgcttgttctgaaa

SEQ ID NO: 1796 - DNA, 166 bp, Homo sapiens
  misc_feature (1)...(166): n = A,T,C or G
tgaggcacagcagtgtaaactttggagncgggaggagcaagcagggtcctggtagccccagttttntgccnntgcctgngatgagttcaangnggtgagcccgtgccntgcctgccntgctgtctntgagccaccgttttggacccaaaccctctggaaccataat

SEQ ID NO: 1797 - DNA, 166 bp, Homo sapiens
  misc_feature (1)...(166): n = A,T,C or G
acaccagaaggagggcatccantcccaccacagnnggccgtgagcctaccntgcagtcgccgggaanctgaacctcaaganctccaaaacagcagccaatgctcccaaccactgagccatccctccagccccccctttttttttaaataaagggattttaactaat

SEQ ID NO: 1798 - DNA, 166 bp, Homo sapiens
  misc_feature (1)...(166): n = A,T,C or G
tatgacgccttctaacagcgagnggcaagctgggggaagaccaagggtcttccttcgaggaatccttggagcagaaacttggnaaaggaggcgttaagaggtagatcgcccgtgcggncantggtgnatccgagctcacatccttaggcttcgttgccacgaaagc

SEQ ID NO: 1799 - DNA, 166 bp, Homo sapiens
  misc_feature (1)...(166): n = A,T,C or G
gactgagtttctgtgcgaggagnctgccctagtgagcaagatcgatagtaccaggatgacctcatcctctgagttacttgacgttgaaaggaaatgcacatgaagagagatagcatcttacagatgttaaataaaaggatcaaggattccatgccaaaaaaaaaaa

SEQ ID NO: 1800 - DNA, 165 bp, Homo sapiens
  misc_feature (1)...(165): n = A,T,C or G
ttgactggttgggggcttctctgnngattcncngtgacncancgccacngctgnnnacctgnngagccanacactgtgcacantttctactggaccangagattattcaggngggaatcgggtcccctcccccttccttcataacctggtgtcgcaacaataaaa

SEQ ID NO: 1801 - DNA, 165 bp, Homo sapiens
  misc_feature (1)...(165): n = A,T,C or G
gtgggagaatcaggtctcncagggccnttcacttgatngccggttgncncgnacaatgcagtanttggagnctggnctntgncaaaataatctnaaggccaaggntgtcatcgaggaataccttcaagtgcaagaaataaataaattttggctgaaaaaaaaaaa

SEQ ID NO: 1802 - DNA, 164 bp, Homo sapiens
  misc_feature (1)...(164): n = A,T,C or G
ctgcatgtgtacttgcttgtgctgngtntcggttgngctttgncgcncnctnaagctganagncaacatgtggcggtggcnngtctgtcggtgnntgctaactgnacctcccagcacaacaatgatggaggtggctggccattcntgtgacctatctgtttcaa

SEQ ID NO: 1803 - DNA, 164 bp, Homo sapiens
  misc_feature (1)...(164): n = A,T,C or G
gaacacctgactgctcttccaaaggtcctgagttcaactcccagcaaccacatggtggctcacaaccatctgtaatgagcgctgacgccctcttctggtcttcaganacacatgtaagagactgctgtatacataatgaataaataaatctttaaaaaaaaaaa

SEQ ID NO: 1804 - DNA, 164 bp, Homo sapiens
  misc_feature (1)...(164): n = A,T,C or G
gactgaggtatcaacccactgactgcactgagcatgtctagagctaaattcggcttantcacctttntgctggagcctggaccctggatcaggagaggacggntacagntgtccctcnanacacacacncnccacgcacaccttcgctttttaagaaaatgtat

SEQ ID NO: 1805 - DNA, 163 bp, Homo sapiens
  misc_feature (1)...(163): n = A,T,C or G
ctcctctttatctatcattctncaatnatatactcacacagcacctgcatgaggacntgtgnttgaannggcaatnagccnatcactggncacccacagcaccttntgactgtanctgaacaccncacatccattttcttgcccgnccttaaggatccccaac

SEQ ID NO: 1806 - DNA, 163 bp, Homo sapiens
  misc_feature (1)...(163): n = A,T,C or G
tgcaggagaccaaagcccttctcaggccccatcccagnagccactcgccactgtcatgtgtgctgcacacagtgggtgccgccatgtccttccttaggaacaccctagaggaaaccaccagctgtttcttgttcccagggctggtgggtggttttggatttgg

SEQ ID NO: 1807 - DNA, 163 bp, Homo sapiens
  misc_feature (1)...(163): n = A,T,C or G
gaaacttgaggcgcacacacngtatttcantcaatcaaacaaacaantaaacaaatgtagtgtgcctgctcagtgggtaaaggtgntactgatggtcctgaaagttgtcctctgactcctacggcagntgtgtgcctccaataaacaaataataagcgtaaaa

SEQ ID NO: 1808 - DNA, 162 bp, Homo sapiens
  misc_feature (1)...(162): n = A,T,C or G
agactgaggccttctgggcagctgnngaggcactgctgcattctggncanctggatgttgcttttcacactgaatgaacagacgatagaaatggcatgtgcnccatgtgcatgcctancacccatggaggncaaannanggcnncaggactttctggagctg

SEQ ID NO: 1809 - DNA, 162 bp, Homo sapiens
  misc_feature (1)...(162): n = A,T,C or G
actagtcctagcgtagctagcccgnccacaaggatactntcacctcctntactcaagcacttgggactacagacaggcgacatcccacatagcttccatgtggatgctaggaatacaaactccagtcctcgccagactctgtccattaagcactctctctct

SEQ ID NO: 1810 - DNA, 161 bp, Homo sapiens
  misc_feature (1)...(161): n = A,T,C or G
gactgagccatccccacagnactaggcaagtgctctactgctgaactacatcgccagccctaagganctggagacaggagggtcagaagntcnaggccatnntncnggtcatgctccatcccggnnctgtctnangtacaaaacngctggtgtcgaaagga

SEQ ID NO: 1811 - DNA, 161 bp, Homo sapiens
  misc_feature (1)...(161): n = A,T,C or G
gacaaccaaaagaaaacgccattgctgaggnnnatcccannntanacttccgnaataatcctactanggaagacttgananagctgaactcattggtgacatcttatctctgctcngatgaacatctgttcccccactgagcctttgaaattgcatggctg

SEQ ID NO: 1812 - DNA, 161 bp, Homo sapiens
  misc_feature (1)...(161): n = A,T,C or G
cctgcctcattcgtgctgccactcccactgntgtnncctgngganccacacactgngcacctttntactgnaccanagattattcngctgggaatcggctncnctcccccttccttcataantagtgangcaacnataaaatttgagccttggtcatacaa

SEQ ID NO: 1813 - DNA, 161 bp, Homo sapiens
  misc_feature (1)...(161): n = A,T,C or G
gactgaggtgccacttggcctgaggtanagcctgancanaggccataatnacttattgtggaactctcannggtnngacnggangcatgnntcgctgcatatatntactgcctcgaatccgatagaattcgagctcggnacccgatgatcgaagttcctat

SEQ ID NO: 1814 - DNA, 160 bp, Homo sapiens
  misc_feature (1)...(160): n = A,T,C or G
actgagctctctccttntgtgtaagacatnccgatgaantcgttctaggatatggtcaccctgnggacaccaagctggccttgaatttgngataatctacttacttctgactttgagtnctggaattatnngtgngtgttacgcctccagtctagaaaat

SEQ ID NO: 1815 - DNA, 160 bp, Homo sapiens
  misc_feature (1)...(160): n = A,T,C or G
agactgaggtggggtcgttcataggtcaantctgtcttnncntctagccacgctccctttgagcagtagcctganacctncagcctgcctgacncacccgtcacatgatgtcttgctctcaaactccaataaaagtgtcctcaagtttcaaaaaaaaaaa

SEQ ID NO: 1816 - DNA, 159 bp, Homo sapiens
  misc_feature (1)...(159): n = A,T,C or G
ctctggaaacacttggagtcatgtntacataccactgactaccaggcatacacacanatncagactnanaataaatccatnttanaacatataaanganatcctgtttctggcctctggaaacacttggagtcatgtctacntaccactgactaccagg

SEQ ID NO: 1817 - DNA, 158 bp, Homo sapiens
  misc_feature (1)...(158): n = A,T,C or G
ctattccaagcaatgtgttccacttagccntgagggagactncncccttctccaagagcccttgnatgaacgaacnagcctgaacatgtnccggagaaacncagaaaggtgcnncgtctaagctgttttgatngagagncacatgtcactccctcaac

SEQ ID NO: 1818 - DNA, 157 bp, Homo sapiens
  misc_feature (1)...(157): n = A,T,C or G
tcacacctgaaatgancacctgagcacatcgttgacaacatcctagctggnntnagaantgctttcagaaaaatnggncagagaaatgggnngagtgngaaactgntgttactgaaaactgagatgtnggnttctgtgnccatcttttcttcatttg

SEQ ID NO: 1819 - DNA, 156 bp, Homo sapiens
  misc_feature (1)...(156): n = A,T,C or G
cctgaggcaggaggccgagggaggcctccgggccgacccgcngcgcggcgctccagcctgcgattccnccacgngcancngangcccaggcngtggcngcgaactaaagaagaaactnaaaangctagactanaagtaaaagggagaagtagaaca

SEQ ID NO: 1820 - DNA, 156 bp, Homo sapiens
  misc_feature (1)...(156): n = A,T,C or G
gagtcgttcctagcttgaagcagccaagcctttggtctgcggaagctcgtttcacttntcgnaangagcaaaactgcctcnggacagcgncggagcactggagatcccatttaacgttgatggcagctcttgttcttatttttaattaattatgtg

SEQ ID NO: 1821 - DNA, 156 bp, Homo sapiens
  misc_feature (1)...(156): n = A,T,C or G
gcaaccccaccccagtattggctccgaggggtgattcagtgttgaactcccaccccgccatgtcggtcagcanagccggaaggagctggtgagcctcgcagcgctgcagtatactgacaaagtccaccttcaacttgcgcgcgccaaaaaaaaaaa

SEQ ID NO: 1822 - DNA, 155 bp, Homo sapiens
  misc_feature (1)...(155): n = A,T,C or G
acgcagcctggcacacnnaagtgattaatgggatgngtatggactagnaactgnantgccacagcaaagaattaggactnacnntaagtacagtaacacccacaacttacttcctgaaccttgtaattaaaggaaacaaaataccaaaaaaaaaa

SEQ ID NO: 1823 - DNA, 155 bp, Homo sapiens
  misc_feature (1)...(155): n = A,T,C or G
agcctgaaacctgcttgctcggngncggagcntactgntcattcgttctgccacngcccantgctggaacctgaggagncacacacggtgcacctttctactggaccaganattattctggcagggaatncgggtcccctcccccttccttcata

SEQ ID NO: 1824 - DNA, 155 bp, Homo sapiens
  misc_feature (1)...(155): n = A,T,C or G
cacgggcccggtgtggtggtgtacgccnnntactccccgcacntcgggaggcanaganaggccgagtttccagagttcgaggtcanccntggtcttcaaagtgagttccaggacagccaggggtatacagagaaaccctgtctcaaaaaaaaaaa

SEQ ID NO: 1825 - DNA, 154 bp, Homo sapiens
  misc_feature (1)...(154): n = A,T,C or G
actgagggccaggcagaaggcaggagcacgcttgcttgccattgtacctgattaccaggatagaatnttgcggnttcacatgatgaaagcagagaactgncttttgcnaactctcctttgagtacctgtgtacatgcatggaacaaacaaacaa

SEQ ID NO: 1826 - DNA, 154 bp, Homo sapiens
  misc_feature (1)...(154): n = A,T,C or G
tctgccactgcccacntgctggancctgaggagccacacacntgcacctttctactggaccaaanantattcagcggggaatcgggncccntcccccttccttcataactngtgtcanaacaataaaattngagccttgatcagaaaaaaaaaa

SEQ ID NO: 1827 - DNA, 154 bp, Homo sapiens
  misc_feature (1)...(154): n = A,T,C or G
ttctaccacgcccacntgctggaacctgaggagccacacacngtgcacctttctactggaccagagattattcngcgggaatcggntcccctcccccttccttcataactagngtngcaacaataaaatttgagccttgatcagaaaaaaaaaa

SEQ ID NO: 1828 - DNA, 154 bp, Homo sapiens
  misc_feature (1)...(154): n = A,T,C or G
gactgagatgtagaactctcacatcctccagcactatgcctgcctggacgctaccttacttccggccatgatgataatggactgaacctcagaacctggngtcngaccacagctacaggtgtgctnntttatnataaataaataaactttaaaa

SEQ ID NO: 1829 - DNA, 153 bp, Homo sapiens
  misc_feature (1)...(153): n = A,T,C or G
agcctgtagcttaccggggacccttctngtgaannactgaangtagngtgatanttnatgcaagaattgcttgngancctttnttgttccagngcacttgaggtcgtcccagacccgaaggagaggtggcgacccctggtgcccatttagaag

SEQ ID NO: 1830 - DNA, 153 bp, Homo sapiens
  misc_feature (1)...(153): n = A,T,C or G
gactgaggtgattttaccacacacagcataaaggaaggtgactgcaggacaagctgcctggcctgcctccagcagtaagttgcttcactgcacaaatgangggaagaatcaacaaaccaaactgccaggctgcacccctaagaaggaaaacag

SEQ ID NO: 1831 - DNA, 153 bp, Homo sapiens
  misc_feature (1)...(153): n = A,T,C or G
ctggcacgcgccactgatggaacctgaggagccngacncgngcacctttgatantggaccanagatcnntctgctgggaatagggtcncctccccctttcttcataactggngtnacaacaataaaatttgagccttgatcagaaaaaaaaaa

SEQ ID NO: 1832 - DNA, 152 bp, Homo sapiens
  misc_feature (1)...(152): n = A,T,C or G
ggtaaaggctgcttgccaccaatgcganggcctgattctgattncgggaacccacgcgttggaaggagagaacacactgntactgccaagctgtcccntggngtcngngctcatncnagtggcatccaaacacacaaataatggaatagatt

SEQ ID NO: 1833 - DNA, 152 bp, Homo sapiens
  misc_feature (1)...(152): n = A,T,C or G
tatttacaatgtaacccaaggactagggcaacaattctgccanctcagcctgctgtgaggantacccagnanctacacctcangcctggccatagaagtnctttctatctctatggatttgtgtatttcggacatatgaataaacgttaaga

SEQ ID NO: 1834 - DNA, 152 bp, Homo sapiens
  misc_feature (1)...(152): n = A,T,C or G
taacatccaatgtccagttncanagactccaccaccctcttctggtctctacagactctgcacacncntactacacatactgtacatgcanncaagcaaaacacncntacacatgancataaaatgtancatcatataaaacagaatgaaca

SEQ ID NO: 1835 - DNA, 152 bp, Homo sapiens
  misc_feature (1)...(152): n = A,T,C or G
ccccacctgaggaccantggncacctggagccgtggagnaagtaacancatgtgagttnttctccatgctaatgattgccctgatctttcatccnntnanntnttntttatgggtanttcttcncacatangatatttaattccttgactaa

SEQ ID NO: 1836 - DNA, 151 bp, Homo sapiens
  misc_feature (1)...(151): n = A,T,C or G
ctgttccacccgacggtcttgcgttcaacttccnncaaccacactggtggcctcacaaccacctggtgnngagcgctgacgccctcttctaggtgtgtctgaaggacgcctccagtgtacttatataagtaaatctttaaaaaaaccaaaa

SEQ ID NO: 1837 - DNA, 150 bp, Homo sapiens
gactgagccctgctgtcctcctggtgtgaagacttggccgcctgctgctgctgcgacatcagaagagccgccagaacgacccccctgggaaactgcccatgcagccccccctcagctccatgagctccatgaaacctgtaaaaaaaaaaa

SEQ ID NO: 1838 - DNA, 149 bp, Homo sapiens
  misc_feature (1)...(149): n = A,T,C or G
gtggctagtaccttccaggaacaggaaaaggcctgctgctcaaacagctgactaaaggagctttnattctgnnagcgtggangcaagtggacnnagccggnantgttnacnacctggagttcagctntctnacccacattaagcgagcc

SEQ ID NO: 1839 - DNA, 149 bp, Homo sapiens
  misc_feature (1)...(149): n = A,T,C or G
gactggagtgtgaggtcgttgtgngtcaccntgtgcnttgctccgaacctgaaccctaggtccctctgcaggagacctcttaattccctgagtcatctctccagccttctggcattagtacnttttttaatgtgagaaaattaaaaaaa

SEQ ID NO: 1840 - DNA, 149 bp, Homo sapiens
  misc_feature (1)...(149): n = A,T,C or G
aggctcagctaatgaggccaatctaccacagaactgaaacctctgacccaganccaagcttaatcttttctcttttaatccttngtttgagaattacaaccacgtatataattaaatatgatcatgtgtacccatgccaaaaaaaaaaa

SEQ ID NO: 1841 - DNA, 213 bp, Homo sapiens
gactgagctagtaatatctcacctaacttcatccatggtggagaatcttttggaaaaaccaaatttgtgttcctgggctcatctttgagaaatggttcttggaaagctggattttgtatcttcaaccggctatactcctgtctggggaaaagaacaattctgcaatatcttgtgttttatgtgtaataaagactacaaggggaaaaaaaaaaa

SEQ ID NO: 1842 - DNA, 149 bp, Homo sapiens
  misc_feature (1)...(149): n = A,T,C or G
gactgagggaggagatgtactntcccctacccnngcctgaancctgcttgntngggggggagcttcctgcngattcgcnntaccacagcccacngntgntacctgatagagccatacacntgcacnatttctacctggaccacgagatt

SEQ ID NO: 1843 - DNA, 148 bp, Homo sapiens
  misc_feature (1)...(148): n = A,T,C or G
agactgaggcgctccataccacntgtggnagtagctacctgagccagatcctctttgcntcacnnntttggaagacgttccaanggacttcntncgangtatnctgctatatttacccagcgtaaccccatcatctgtggccttctga

SEQ ID NO: 1844 - DNA, 147 bp, Homo sapiens
  misc_feature (1)...(147): n = A,T,C or G
ctgacagaagactggtggtcgtcagaccagnnacagtctatgacantttttgancataanatgnacaccgnagattactacgaanacagggngtngnagaatgggacccctagggacaaagcggnagctacagaaaacctttggatt

SEQ ID NO: 1845 - DNA, 146 bp, Homo sapiens
  misc_feature (1)...(146): n = A,T,C or G
tgactcagcggttaaaagcactgactgttcttncagaggacctgagttcaattgccagcaaccacatannggctaacaaccatctgtantgagatctgatgcccacttcaacagtgtacttacatatacataaataaataaatggt

SEQ ID NO: 1846 - DNA, 146 bp, Homo sapiens
  misc_feature (1)...(146): n = A,T,C or G
ctgataagcaatataancaccatgctgtggnggcaggnagcccnctcttnaatgactccatggtgaaagtagtantnagacncananacntctttttagaggacccgtaanaccacagntactccccatactttatttttgtataa

SEQ ID NO: 1847 - DNA, 146 bp, Homo sapiens
  misc_feature (1)...(146): n = A,T,C or G
tttctggcccttcggagcagcagncggnggctnttacccantgngccntcttnccagnccacacctgcaagnnctaacttcccngaggaccagacnccctcttcaggctttcaaatgcngncacacacatggggtattgtgcttac

SEQ ID NO: 1848 - DNA, 146 bp, Homo sapiens
  misc_feature (1)...(146): n = A,T,C or G
gactgagagaacagaactcaggctcggntacaggntaaggnttcatntgnantgannagnatccgacacctataagccttcacttgaacagccaggcagagaggaagaaggaaaanaacngcgggcctgngtggaccaaggaagga

SEQ ID NO: 1849 - DNA, 146 bp, Homo sapiens
agactgagatatgatgtagctctctgctactgctccagcacctgcctgcatgctgccatgctccctgacatgatgatgatgaagaactaaacctctgaaattataagcaagtcctaattagatgcttcgtaacagtaaaaaaaaaa

SEQ ID NO: 1850 - DNA, 146 bp, Homo sapiens
  misc_feature (1)...(146): n = A,T,C or G
tgggaaaacccaaaaggananngtttncccgcacngnncctgnaattgaacncgggttcattgggttganccctccttgagaatcctggtcttgngacttatggtaaggaagttggcaagggccngggaggaattgtttccattgg

SEQ ID NO: 1851 - DNA, 145 bp, Homo sapiens
  misc_feature (1)...(145): n = A,T,C or G
ggaagaagggggcaaggccgantccntgagcntccggantgcaggctggggacgangtcnnacacctcactgaggtggcgcntgagcagttccaggagagaggctgtctccctagtgaaacgggtccctacaagacccctgcggc

SEQ ID NO: 1852 - DNA, 145 bp, Homo sapiens
  misc_feature (1)...(145): n = A,T,C or G
gaacttgaggacaagatgtagaacntctncanctcatgcctccagcaccgtgtctgctcngcacactgtcatgtttcctgccatgnggcgaatggactgaacctctgaatctgtaanccggccccattaaatgttttccttctaa

SEQ ID NO: 1853 - DNA, 145 bp, Homo sapiens
  misc_feature (1)...(145): n = A,T,C or G
atggagtgtggagtgcccagccccatcaactgnatctacaacacaactcccgcacctatgcccagggaanactgtntaagaggagncancaatactatgcnagctctgtatcccctgngaggccttcataagaaaaaactataac

SEQ ID NO: 1854 - DNA, 144 bp, Homo sapiens
atgctgagcgacctgtgtagccatgacaggctgagccaggatctgaaccaagcatctctgcaggtgcggatgttgcgacccagacttgttgtacatattttgcatactgtctgattaaacacaaacagacctcaaaaaaaaaaa

SEQ ID NO: 1855 - DNA, 144 bp, Homo sapiens
  misc_feature (1)...(144): n = A,T,C or G
actgagggtctcttccacagacctgantggaggngacgcccccgtgggagtnnttgttgctttgctgnnccnnttcacnntctttggatgcctgtggaccggtcctgntgangacaggtcccgtgtgggccgggaacgagctca

SEQ ID NO: 1856 - DNA, 144 bp, Homo sapiens
  misc_feature (1)...(144): n = A,T,C or G
aaatgctgctttctcatctacctggcttgcagagagcaatctgtcagggcagatcacatgctcacacagatgtgaggccagctatgccatagtaagccagacattaaagaggtgtacaacagngctgttttttttctaataaaa

SEQ ID NO: 1857 - DNA, 144 bp, Homo sapiens
  misc_feature (1)...(144): n = A,T,C or G
gaactgagggaggagatgtagtntcgccctacccngcnctganacctgcttgctcggnggggagnntncctgctgattcgnnntgccacgcncacctgctggtacctgangagccacacacagtgcacctttctacgtggacca

SEQ ID NO: 1858 - DNA, 144 bp, Homo sapiens
  misc_feature (1)...(144): n = A,T,C or G
tttagctgaagatgaccntgaacttccanacgcgtcttgccnttcacctcttctaacnnctgtgatcgtaagtctacaccacccgtgaacgnctcttggntgaaataaaatgcacccncntgaaatttaaatgcaacctgaaaa

SEQ ID NO: 1859 - DNA, 143 bp, Homo sapiens
  misc_feature (1)...(143): n = A,T,C or G
tctccgtgaggaaaagtcgngctcgagnaccacgantnanntcatanagtgtgggtcgnaacaanctacattgngacagcatttgagnncnaggctagcctgatctacatagagaaagcctaccaaggagaagaaagaaaaaa

SEQ ID NO: 1860 - DNA, 143 bp, Homo sapiens
  misc_feature (1)...(143): n = A,T,C or G
tgcatactctgaggagccacacactangcacctttctactggaccagagattattctggctgggaatcagggtcccctcccccttccttcataactggngtcgcaacaataaaatttgagccttgatcacgaataaaaaaaaa

SEQ ID NO: 1861 - DNA, 142 bp, Homo sapiens
  misc_feature (1)...(142): n = A,T,C or G
tctgcctgcactgacctggacnctgctgatgccccnctcctcccgtctgcngcggcggnggtactcggnggacncggccttggtcncattacncnctgncaganagtccaccccaggngccanntgatcacagtgaccaggg

SEQ ID NO: 1862 - DNA, 142 bp, Homo sapiens
  misc_feature (1)...(142): n = A,T,C or G
agactgaggcttttctttgtgtagctccggctgttttggacgttgntntgtagtcctngcctggccctctcnnagcgccacntggnnttcntcccttcccagtgcctgggcgtaaaagtgtgtgccaccaccaaaaaaaaaa

SEQ ID NO: 1863 - DNA, 142 bp, Homo sapiens
  misc_feature (1)...(142): n = A,T,C or G
ctcactactgcctcangcacagtcctntnttcaggtaaggaccacangcnaaanctatnngtnnancccntcccccgatactgagtanagcctattgaaaagggcctcatggctatgntctccagtacatgtaaacttgttg

SEQ ID NO: 1864 - DNA, 142 bp, Homo sapiens
  misc_feature (1)...(142): n = A,T,C or G
tcttttgttgacacccagtctttgcttgnattacattaaagtngcntaaacccantaactgcccnaagcnngtcatgtgctnatcttttgttgacacccagtctttgctgtattacattaaagttgcataaacccattaatg

SEQ ID NO: 1865 - DNA, 142 bp, Homo sapiens
  misc_feature (1)...(142): n = A,T,C or G
aatgcatcgttacgctntgctcantatntattacttgcaacaggattgnggaacctgttctcagaacaggnctatatactcaagccatctgncagccgaatctgngatcanctgangaatacaaggccttccagtttggaca

SEQ ID NO: 1866 - DNA, 142 bp, Homo sapiens
  misc_feature (1)...(142): n = A,T,C or G
gcttgctctgggtggagcttactgctcattcngtctaccangcccactgctggaacactgaggagccacacacggtgcactctttntactgnaccagagattattgggtggnaatcncagtcccnatcccccttgcttcata

SEQ ID NO: 1867 - DNA, 141 bp, Homo sapiens
  misc_feature (1)...(141): n = A,T,C or G
tgacagaaattcctaaagaagagaaggaccctggaatgggtgcaatgggtggcatgggagggggtatgggaggcggnatgttctaactcctanagtagngctttgcccttatcaatgaactgtgacaggaagctcaaggca

SEQ ID NO: 1868 - DNA, 141 bp, Homo sapiens
  misc_feature (1)...(141): n = A,T,C or G
tcttctccgagcgcctnctnaagctgacctttattattgctntcctaccncatagcctagaggaccataantactgaggagccccattgggnctngcaaagttgaggnnncnggccataacctggactcctggcaggacgg

SEQ ID NO: 1869 - DNA, 140 bp, Homo sapiens
  misc_feature (1)...(140): n = A,T,C or G
ctgtgaggatggaggcacctcttcagggcagaggacttgtacctcagcccgantncatcacacnattcntcatgancctnnagctccggattgtcagaaaacaagcgtgtgtcacatgggctacgcacaggggtcctgtt

SEQ ID NO: 1870 - DNA, 140 bp, Homo sapiens
  misc_feature (1)...(140): n = A,T,C or G
tcttgagttcaaggccagcctggggnatatggnctacttaanatatggcgtgcgtgaacngctaangaccaggataagcttggccatggatgcttgctantntgtncagctggacgcccagtttccaccagtcgcatttg

SEQ ID NO: 1871 - DNA, 140 bp, Homo sapiens
  misc_feature (1)...(140): n = A,T,C or G
cactgcatggaacctgaggagccacacacgtgcacctttctactggaccangagattattnggcggnaatcgggnnccctcccccttccttcataactgggggngcaacaataaaatttgagccttgatcagaaaaaaaa

SEQ ID NO: 1872 - DNA, 140 bp, Homo sapiens
  misc_feature (1)...(140): n = A,T,C or G
agactgaggcctgggaggtgggaaanaagacnccctgctagccagccagtctagcccgtncagctccagactgannaantggctntgnctcaaaatgaagangatgatgaccacaanctacacattgttatgaggaacga

SEQ ID NO: 1873 - DNA, 140 bp, Homo sapiens
  misc_feature (1)...(140): n = A,T,C or G
gctgcatacctgaggagccacacanntgcacctttctactggaccagagattattcggcagggaatcagggtcccctcccccttccttcataacctggtgtngcaacaataaaatttgagccttgatcagaaaaaaaaaa

SEQ ID NO: 1874 - DNA, 139 bp, Homo sapiens
  misc_feature (1)...(139): n = A,T,C or G
caccggaggttcataaaactgctaacatttgtctctcccctntgagctggagattgaaatcaagatcttgtacatgatatctaggcacacactttcttactcactggtctgcatacccagttataataaatgtttaaaa

SEQ ID NO: 1875 - DNA, 139 bp, Homo sapiens
  misc_feature (1)...(139): n = A,T,C or G
tttttttttcaaatacacattatataaatnacaagttttctantttcananactttgcactcagnttaggtgccaaaacattaaaaatggaaaacaatttttgaaataaaattaaaacaagacatattgcaaaaaaaaa

SEQ ID NO: 1876 - DNA, 139 bp, Homo sapiens
  misc_feature (1)...(139): n = A,T,C or G
catgggggactctcacgangaccncagtgccacagtgccctgaggcngtggcctgangacgtgtcttctattccgcacagcgganntttgttctgttttctctcatcgtgggggtccctgncccacctggttcctcttt

SEQ ID NO: 1877 - DNA, 139 bp, Homo sapiens
  misc_feature (1)...(139): n = A,T,C or G
aggcgcccttgggttcntttcttttcnttttgtggaacaccacaatctcagctccataggacacatcaggcttcaagtntncnccctgtagaattctaaaataacctttgctaatgaggatgtctgatattgttattat

SEQ ID NO: 1878 - DNA, 139 bp, Homo sapiens
  misc_feature (1)...(139): n = A,T,C or G
gactgagagcttcctggtgctcgggcatgagcctggccaggtcctgatgttgaaggcaggaccttcttcaggagatatcaacacctatcaaattcagaggnttcctggaggtgtgtccctggaatccagcgacctctgc

SEQ ID NO: 1879 - DNA, 139 bp, Homo sapiens
  misc_feature (1)...(139): n = A,T,C or G
aagactccaccaccctantatgggctttacagactcttgctcacacanactacacatactgtacatgnnnncangccanacacgcgtacacatgaanntaatgtgtttttaacattggagaangaacattcgcgctatg

SEQ ID NO: 1880 - DNA, 139 bp, Homo sapiens
  misc_feature (1)...(139): n = A,T,C or G
ccctggggagccacaacacgtgcaccntttcntnctggacccnacgncgttcttcggcgggaactcaggatccccntcccccnttcntttntaacttgnngtcacaacaataaaatttgagccttgatcaaaaaaaaaa

SEQ ID NO: 1881 - DNA, 138 bp, Homo sapiens
  misc_feature (1)...(138): n = A,T,C or G
ctgcccatgcgttggagagatccgtatgttcctgctcctactcaangcacacagaaggaaacngcttggcttnatcggntctangaataanttaccaccctgtggaaagaccnagccggnngctgttggaggaccccc

SEQ ID NO: 1882 - DNA, 138 bp, Homo sapiens
  misc_feature (1)...(138): n = A,T,C or G
agaccttatcatctatgatgacattngatgctgatgtgccgcataattaccaggagtncaatctggncaacctnatntactactccctgaaggagtccaccaccagtgagcanagtgccangatgaccgtcttggaca

SEQ ID NO: 1883 - DNA, 138 bp, Homo sapiens
  misc_feature (1)...(138): n = A,T,C or G
agtttgccagaaaaatggtatgtgcagtgggctctaggtaaaagaccttttccagctgcttctagtctaccttatttagcgccncctctcgctctgtcattaaaagaaatgtaattgaaagaaatgtaaaaaaaaaaa

SEQ ID NO: 1884 - DNA, 138 bp, Homo sapiens
gactgaggcctgcctggcctacagggcaagtattggtcccataaagggggagacagggccacttaatcaacatgagcattaagcttttccttctgaacaactttaataatgaatcatactctttttgaaaaaaaaaaa

SEQ ID NO: 1885 - DNA, 138 bp, Homo sapiens
  misc_feature (1)...(138): n = A,T,C or G
gagcccggtcgtggtggntcacacntttantcccagcactcgggaggcagaggcnggcntgnnttcctgagttcagggccagcctggtcctacaaagtgagtttccngggcctntacagagagaacccctgtctcgaa

SEQ ID NO: 1886 - DNA, 138 bp, Homo sapiens
  misc_feature (1)...(138): n = A,T,C or G
atctatcgcaagggctactgcacgcactgccccctntcgngntngatnaacttgcctgcntagtaagaagttgctggccatacgaacaacctcgcgccccaanaaagaaggtnataataaagctgtaggacatacctg

SEQ ID NO: 1887 - DNA, 137 bp, Homo sapiens
  misc_feature (1)...(137): n = A,T,C or G
caaaccgtgggacaccaantcacccggtgacacctgcttgaacgcnnannnnnnaaggcttgtcttttcgntgtacagancgcaantaaacaattntttcttgagcaaattttttttttttttttttttttaaaaaa

SEQ ID NO: 1888 - DNA, 137 bp, Homo sapiens
  misc_feature (1)...(137): n = A,T,C or G
cttgtggtgccacacacagtgcaccanttctacgtggaccanaagagtattcggcggcaatcgngtcccctcccccttccttcataactgntgtcncaacaataaaatttgancnttgatcaggagtaaaaaaaaaa

SEQ ID NO: 1889 - DNA, 137 bp, Homo sapiens
  misc_feature (1)...(137): n = A,T,C or G
atatgccgtcgactgttacgaactctttttgntaacccccccangtctgccaggngctgcttccttctattaaaaccccangcaaaaatngngaaaagagtccanccatggtgagtcttaaggccccttaaaaaatt

SEQ ID NO: 1890 - DNA, 137 bp, Homo sapiens
  misc_feature (1)...(137): n = A,T,C or G
atgcctttcccggcctcgnnnccggcctgtgagcggctggcccggcctcancaaccttggcgagccnncctccggaccctgngactggcagcgtacctttggangangcacctgcctggtttggcgcctctgtggaa

SEQ ID NO: 1891 - DNA, 140 bp, Homo sapiens
ggactgagctgtctgaagagtcagtaaagggcttcagcaacccctggtaattacaagaggatgaattgcccaacatgggtgctcggacctcagatcctctgcaagagcagtaaatgtttttaaacgctgaaaaaaaaaaa

SEQ ID NO: 1892 - DNA, 135 bp, Homo sapiens
  misc_feature (1)...(135): n = A,T,C or G
gagctgctaccactcgacatagagncccctccttggtctcctttgatgaccgtgncgtgagcttcacagggangnggataaacaggaccaggnacatcctgctaccagcactgncgccactcatggcatccaggt

SEQ ID NO: 1893 - DNA, 135 bp, Homo sapiens
  misc_feature (1)...(135): n = A,T,C or G
gtgagacctgctagctacagcgtggagcgntnctgctcagctctgctctgacagcccantgcntggagnctgaggagctcacacactgtncaccgtttactananggaccaganattattcaggcagggaatcag

SEQ ID NO: 1894 - DNA, 135 bp, Homo sapiens
  misc_feature (1)...(135): n = A,T,C or G
tggaacctgaggagccanncacgtgcacctttctactggaccaagagattattcggcgggaatcgggtcccctcccccttccttcataactagtgtcgcaacaataaaatttgagccttgatcagaaaaaaaaaa

SEQ ID NO: 1895 - DNA, 135 bp, Homo sapiens
  misc_feature (1)...(135): n = A,T,C or G
agactgaggtgcgcgtgtcgccgtngccgccggccggagcgattctcacggcaggaaggagcacgccaacagggcctgactgcgtacagacatgtccccctcantaaaattgcagttgaaatggaaaaaaaaaaa

SEQ ID NO: 1896 - DNA, 135 bp, Homo sapiens
  misc_feature (1)...(135): n = A,T,C or G
gatacactcagatgacttgcactggttgtagcanaaatctggtaaagtcatcagacatacngaccnatgttgngactggacggncttgtccctggaccctaccantaaccacaccaataacaccaactgtaaaaa

SEQ ID NO: 1897 - DNA, 134 bp, Homo sapiens
  misc_feature (1)...(134): n = A,T,C or G
aatttgctgttcaagctgaaaagaaaattgaagttgtatgtggntgaacccttggtgagtngagccatccatnaatgntcatccccnccccnttttggtttnganggcnaagaaaccaacttacccaggggggt

SEQ ID NO: 1898 - DNA, 134 bp, Homo sapiens
  misc_feature (1)...(134): n = A,T,C or G
cttgaggagccacacactgtgcacctttntactggaccatgagattattcaggnagggaatcgggtcccctnccccttccttcataacctggtgtcacaacatataaaatttgagccttgatcagtaaaaaaaa

SEQ ID NO: 1899 - DNA, 133 bp, Homo sapiens
  misc_feature (1)...(133): n = A,T,C or G
atggaggcggtgaccttnggcnacgtgnctgtgcacttctctnnagaggagtggcngngtctggattctgnccatnagggccctctacaaggaggtgaggcctggagaaccncagcagcagtggcaggactag

SEQ ID NO: 1900 - DNA, 133 bp, Homo sapiens
  misc_feature (1)...(133): n = A,T,C or G
cgcatgactgggcgctaatcaacaactctctaattggacctagggccggaagcctagccaactactcagttcctgtgaagtcattggaggagaatctacanccactgatctattaaaccagaataacacctaa

SEQ ID NO: 1901 - DNA, 133 bp, Homo sapiens
  misc_feature (1)...(133): n = A,T,C or G
tggaacctgaggagccacacacgtgcacctttctacnggaccatnagantattgggngggaatcgggnaccntcccccttccttcataactggngtnacaacaataaaatntgagccttgatcagaaaaaaaa

SEQ ID NO: 1902 - DNA, 133 bp, Homo sapiens
  misc_feature (1)...(133): n = A,T,C or G
agactgaggcccttctcgaacccaaaaatctggaacntggtgtanctgnccntgtgctgaatgcacgcacancacagcctctngtntctgttttaanttcgtccnttaaacgaagtacagtcctggaaaaaaa

SEQ ID NO: 1903 - DNA, 133 bp, Homo sapiens
  misc_feature (1)...(133): n = A,T,C or G
gaaacctgaggagccanacacntgcacctttgtactggaccaaagattattnggcgggaatcgggncccctcccccttccttcataactagtgtcgcaacaataaaatttgagccttgatcagaaaaaaaaaa

SEQ ID NO: 1904 - DNA, 132 bp, Homo sapiens
  misc_feature (1)...(132): n = A,T,C or G
gaccatgcagcatcgtcagcttgnttgatttcttccaanaactggatatcaaccttttagacaacngtggtgaattgctttataccatggagaaggagcccagcaatagaatggcttcaagaagtacttgac

SEQ ID NO: 1905 - DNA, 131 bp, Homo sapiens
  misc_feature (1)...(131): n = A,T,C or G
cttgtaacactggggagcctaangcctaggnctggntgacccctgtgtggggactgccacacaatagaattaggccttttcgcttctgtgttagaaaaataaacacacttaggacatgggaaaaaaaaaaa

SEQ ID NO: 1906 - DNA, 130 bp, Homo sapiens
  misc_feature (1)...(130): n = A,T,C or G
gggggggacggattaactcctctcctncacnggctnccttcttagaatcccaccccantttcttttccncccatttntttgcntganacttgttcacagaacttctctnntnagaggctgcatgatagag

SEQ ID NO: 1907 - DNA, 130 bp, Homo sapiens
  misc_feature (1)...(130): n = A,T,C or G
gactgaggggaagtacgcaggcaatatggcaacattgtttattcacatttgcagctgtcatcacaacagccattttagctttcaggagagaggcaagggattacnaggtgctctccatgggttgtgctcc

SEQ ID NO: 1908 - DNA, 130 bp, Homo sapiens
  misc_feature (1)...(130): n = A,T,C or G
ggagaaggtctttttaagggctnaaaaaccttnattggnggnnatcgcgggnagancttaatgagagggccgggnaaaatnntgctccggccttagagaattttttagaacaaggggtatggtatttgat

SEQ ID NO: 1909 - DNA, 129 bp, Homo sapiens
  misc_feature (1)...(129): n = A,T,C or G
acacaccttcaataatgttacaagcnccattgnatatatatcatatacatannnngcattcncttnncncactatcttcataangtggttgtctgcaacacgtaagaatattngagcccttgatcacgt

SEQ ID NO: 1910 - DNA, 129 bp, Homo sapiens
  misc_feature (1)...(129): n = A,T,C or G
gattgggcgaatagatnattaatnatgnctgcnaccncacaaangtactnagactgggacctnagccaagcancacntactgaggatacacagggcccggattttaaaatggagcttaatatataatat

SEQ ID NO: 1911 - DNA, 129 bp, Homo sapiens
  misc_feature (1)...(129): n = A,T,C or G
gctggcgacacctgggaggctnccgctggntgccacgtctccgccacccgnactaccagngnagccttntggctttccgctttctccttcttagggatggaggcaattaatatcatcgctttcccgcag

SEQ ID NO: 1912 - DNA, 128 bp, Homo sapiens
  misc_feature (1)...(128): n = A,T,C or G
ctgacctctacatgcatgcgtgtgacncctgtacaaccactcaaatggacagacacagaggacacacacaggagggggagagaaatacanagatacacagagacataataaatatataaaataaaaaa

SEQ ID NO: 1913 - DNA, 128 bp, Homo sapiens
  misc_feature (1)...(128): n = A,T,C or G
ttcaaattccagcaaccacatngnggctcacagccatctgtaacagaaatctgatgccctcttctggagtaactgaggacagctacagngtacttacatataataaatanatatgtcttaataaaaaa

SEQ ID NO: 1914 - DNA, 128 bp, Homo sapiens
  misc_feature (1)...(128): n = A,T,C or G
ggtggttggttgcagttgctgtagtggttaaaggacctntggcaaanaactctcaggccaaggantgtcatcgaggaatacnttcaagtgcaagaaataaataaattttggcctgattaaaaaaaaaa

SEQ ID NO: 1915 - DNA, 128 bp, Homo sapiens
  misc_feature (1)...(128): n = A,T,C or G
cacacagtagtgcaatggcggcgcctcgctctggagaantnacntgcanaannatggcatttcccccntncangatttatacagaagcagtcttccaaattctgaaacctgatgcccatcacatactt

SEQ ID NO: 1916 - DNA, 127 bp, Homo sapiens
  misc_feature (1)...(127): n = A,T,C or G
tttccttttctcgaggagcatacaacntggcntggtaactgacctnttnnnttntccacccaaaagccttgtctgggttgaaagancctcaaagtccntgtaagtaatgcagttttaaaaaaaaaaa

SEQ ID NO: 1917 - DNA, 127 bp, Homo sapiens
  misc_feature (1)...(127): n = A,T,C or G
gggccttcaggcccaccgttcntctccngtgcctcanggangctncantgcggttttctntnagnngaggtagcgccaacaaaacaccgttcgaccctgtgcagtcacctgccagcggtgtgtccca

SEQ ID NO: 1918 - DNA, 127 bp, Homo sapiens
  misc_feature (1)...(127): n = A,T,C or G
aggccattttgtggtancaagcattggngctactgggctggnaccttnacccgncattgaaatanctgatgncantctgtggaancngacctgganctgagtgaatttgtttccatgcatccaggat

SEQ ID NO: 1919 - DNA, 127 bp, Homo sapiens
gactgaggtggggtctttcacaatgatgacgacagtgacttcctggacatatgggcctgttcttcaccagacagtctgtccttgaccttgagactaaagcagtgcagagtccgccaaaccttggata

SEQ ID NO: 1920 - DNA, 127 bp, Homo sapiens
  misc_feature (1)...(127): n = A,T,C or G
tgcaccttctgcagagggactgagganccactcaaattcannnggacacctgctgcttgcgtgctgatacaagagactngggaggcagagaattaaaaatctgaacatttgtgagcgtgtgaaaaaa

SEQ ID NO: 1921 - DNA, 127 bp, Homo sapiens
actgagtgctagtgcagaacccagggccaagcaaacagcccgcaaggcttcctccctttcccttgcctgctctcttaatacacaaaaagcaaagctgggggcagatccgagaagaaagaaaaacaaa

SEQ ID NO: 1922 - DNA, 126 bp, Homo sapiens
  misc_feature (1)...(126): n = A,T,C or G
gactgagatatttgaaacgttggggttnttggagtggtngcnatatttanntcttgggganctatnataggacgacnnggaancatggtcngtgtccatatntttactgcgctcctatccgtgaaa

SEQ ID NO: 1923 - DNA, 126 bp, Homo sapiens
agactgaggtcctgagttcaaatcccagcaaacacatccgtaaggagatccgactccttcttctggagtgtctgaagacagctagagtgtacttacatatagtaaataaattcttaaaaaaaaaaa

SEQ ID NO: 1924 - DNA, 126 bp, Homo sapiens
  misc_feature (1)...(126): n = A,T,C or G
acatccacattggtggctcacaactcatgatgtaatgggatcanatacactcttctggtgtgtctgnagacagncacagtgngctcatatncttaantaaataaataaataaggtctttaaagaga

SEQ ID NO: 1925 - DNA, 126 bp, Homo sapiens
  misc_feature (1)...(126): n = A,T,C or G
cccggacaagctaaacaagnaacctctcagcatcccttgcagctaaggtagcccagctctgggcaatgggatagaggcagaagagtttccttcctgaatctaaaagtaaaacttccatggaaaata

SEQ ID NO: 1926 - DNA, 125 bp, Homo sapiens
  misc_feature (1)...(125): n = A,T,C or G
catctgtgcagacctgtggcaagtctcttcagangtgacgatnattctaggaaggtcagttgngttgaggtccccaacaagctttgccatctggaatttgntttcggccttttcaaaaaaaaaaa

SEQ ID NO: 1927 - DNA, 125 bp, Homo sapiens
  misc_feature (1)...(125): n = A,T,C or G
gactgaggcaaagccnaagctgatcgagccctggactacgaaaatgtcatngtgcagaagaagacgcanatcctaaacgactgcctgcgggagatgctcctcttcccttatgatgacttccaggt

SEQ ID NO: 1928 - DNA, 125 bp, Homo sapiens
  misc_feature (1)...(125): n = A,T,C or G
gagccacacacagtgcacctttctactggaccatgagattattcggcgggaatcgggtcccctcccccttccttcataactggtgncncaacaataaaatttgagcnttgatcagaaaaaaaaaa

SEQ ID NO: 1929 - DNA, 125 bp, Homo sapiens
  misc_feature (1)...(125): n = A,T,C or G
tgaggagccacacacagtgcacctttntactggaccatnagantatncggncgggagctgagaccccttcccccttncttcataacttggggcancaacaataaaatttgagctttgatcagtcc

SEQ ID NO: 1930 - DNA, 124 bp, Homo sapiens
  misc_feature (1)...(124): n = A,T,C or G
tttctgtgcccgctgccatgcntgcctgctgccatgccttcccanccctccntggtgngggcgtcttcttccctctganactgtaagctcaaataaacccgtttctaaaccgcaaaaaaaaaaa

SEQ ID NO: 1931 - DNA, 124 bp, Homo sapiens
  misc_feature (1)...(124): n = A,T,C or G
ttttgtaccgcggcggctacagtgangcaccctcnganacctgagnntgngacttggntcttggngttcagagttcccagcatccagancagtgaganataaagttatgtgctttatatcctaa

SEQ ID NO: 1932 - DNA, 123 bp, Homo sapiens
  misc_feature (1)...(123): n = A,T,C or G
gacatacttatctatggatnctaacctangctntggccttgggtgagngtcacaatcancgccttgtaataaacattacagctctccctctgngagncagtcccanagtgaagacaaaaaata

SEQ ID NO: 1933 - DNA, 123 bp, Homo sapiens
  misc_feature (1)...(123): n = A,T,C or G
aaggttgatgacaacaaganactagnggaatgggtagncctctgtanaatcgatcgatagggcaaaccacnnaancgtaggttganttgcatgnngctgtagttggttaaggactatggcaca

SEQ ID NO: 1934 - DNA, 123 bp, Homo sapiens
aaagttcactctccccaaacaaggctgtggcctggtagggcagtcacctaaggacggggaagattgttcctcagtaagtgctgcgcggggcttttgctagaagtggcatattaccaaaagaca

SEQ ID NO: 1935 - DNA, 123 bp, Homo sapiens
  misc_feature (1)...(123): n = A,T,C or G
gtgtgtatgtaagtanaananctttgcaaccannctganggcccgagntcgnngcccagaagccacatggntnaagagaattgactcctacaaaagttggtctnacttccacgtatatactgt

SEQ ID NO: 1936 - DNA, 122 bp, Homo sapiens
  misc_feature (1)...(122): n = A,T,C or G
ccaccagtacccacgaaggaaaaagccaaaatggaattacatggatgtgttctctctgntccacttctgatcagattcattgnaacagtactagccctgtcaagataatcgatcccagatga

SEQ ID NO: 1937 - DNA, 122 bp, Homo sapiens
  misc_feature (1)...(122): n = A,T,C or G
taccttcatgccctcattcttcaaatcttatanatcttnttttcttatactactgagatgtgcacancgacnnagctacancanacncaggcacaacacacaaaancccatctccatcccat

SEQ ID NO: 1938 - DNA, 121 bp, Homo sapiens
  misc_feature (1)...(121): n = A,T,C or G
actgagcaccaccaaaaaaggacncggaggcgcncccgangcgcacangacaaaagcgantgcnggggcaccccntggccctggaccgcggcaacagcctcntgccttcggtgccagagga

SEQ ID NO: 1939 - DNA, 121 bp, Homo sapiens
  misc_feature (1)...(121): n = A,T,C or G
cgccagatctgaagattgcatatccaggaagcttgntnttctttacanggtnnagaaactantgaaactgcngnnatgccagctggctggacgtctgacagcacacaaggacctgagggct

SEQ ID NO: 1940 - DNA, 121 bp, Homo sapiens
  misc_feature (1)...(121): n = A,T,C or G
cccacgtgaaactcgcccttgtccgcntgcaannggtgggcnaaccgaccgtccntgcgccntgattgcgcgngggaacccanncgcgcagccntggagcaggtgtgtcagcatgggcaca

SEQ ID NO: 1941 - DNA, 121 bp, Homo sapiens
  misc_feature (1)...(121): n = A,T,C or G
cgatgaggggatgaactctggttcagncacatctatgntctaaaagccgagtgcctatnangcatacttgnggcctncctctntatggaagnccacncctantcgctgaatatctggagag

SEQ ID NO: 1942 - DNA, 120 bp, Homo sapiens
  misc_feature (1)...(120): n = A,T,C or G
atgggagtcattacttgaacatacctgctggagaatacgnncttgctcaaaagtaagcangnanacaantacctgntattaaacctttcatanangananatgaccttacaaagcttaat

SEQ ID NO: 1943 - DNA, 120 bp, Homo sapiens
  misc_feature (1)...(120): n = A,T,C or G
tcctaaagctgctgtaccctgctgcancnccggtctgnccgtaacactnctccggcgactctgganataatgaaagcntcagaaaaaaaactggtggangaatctgtaaacaaaaataaa

SEQ ID NO: 1944 - DNA, 120 bp, Homo sapiens
  misc_feature (1)...(120): n = A,T,C or G
agaacttgaggtgggtttgggcntgaagtagcgccntnggcagaggccntanttaccttcntgtggaacctctcaanngtcggaccngangcntggcctggttccctctaaaaaaaaaaa

SEQ ID NO: 1945 - DNA, 120 bp, Homo sapiens
  misc_feature (1)...(120): n = A,T,C or G
ggtggagcttcctgctcattnanttctggnangccnactggtngaacctgaggagccacacactgtgcacctttctactggaccacnanattattcggcagggaatccgggtcccctccc

SEQ ID NO: 1946 - DNA, 120 bp, Homo sapiens
  misc_feature (1)...(120): n = A,T,C or G
tttagtagagacttactaacctcctgatngaancgatttnnnatncgacactgtggatncctatcacgacgttnganaancccccttactcatgtcttnccacaaaaacccggtttggtt

SEQ ID NO: 1947 - DNA, 119 bp, Homo sapiens
  misc_feature (1)...(119): n = A,T,C or G
aacaaaggaaaacaacaggaggtccaagaggagtgcccntgaggatgggtancagaagccatatgcctcnaaccnttacantcancattcagaaaatgtttggaccaaagggcacactg

SEQ ID NO: 1948 - DNA, 119 bp, Homo sapiens
  misc_feature (1)...(119): n = A,T,C or G
gcgcgtgtcgccgaggccgccaggacggagcgattctcacggaggaaggagcacgccaaacagggcctgactgcgtacagacatgtccccctnaataaaattgcagtttgaaatggaaa

SEQ ID NO: 1949 - DNA, 119 bp, Homo sapiens
  misc_feature (1)...(119): n = A,T,C or G
gaaggaccttgaggcttgtgcttcaaactgtcgtcccaccntcancnctcccgatgacgcntgctgcgacccgaccngccgtgcgntcttacctaggcaaaataaagttgttgaaatga

SEQ ID NO: 1950 - DNA, 119 bp, Homo sapiens
  misc_feature (1)...(119): n = A,T,C or G
gggctgaggtacacctgggcanaggccatnatgacttctngcggaactcncacagggcggncaggnancatggctggttccatatattcgatnaaccttccccatttaactaaaaaaaa

SEQ ID NO: 1951 - DNA, 119 bp, Homo sapiens
  misc_feature (1)...(119): n = A,T,C or G
atgcctgaaaccccantaactgcggactggattgctgagttcataggacagcgtgggctacaaggagtgnggtctcantctgtatgagcctatgtgagaccttgcattcaaattaaaga

SEQ ID NO: 1952 - DNA, 119 bp, Homo sapiens
  misc_feature (1)...(119): n = A,T,C or G
tgaggaagccacacanagtgcaccctttcctcctgngcccagagantatttcggccgggaaatcngggntccccctccccctttccnttcataactnggtggtcacaaccaattaaaaa

SEQ ID NO: 1953 - DNA, 119 bp, Homo sapiens
  misc_feature (1)...(119): n = A,T,C or G
tgagaataagacacctaacgaagctaacgacactaacggggaatgangataatccgacctcctgtccctttgttttactnctttaacctagtaataaatccctttaaaggcccgagaaa

SEQ ID NO: 1954 - DNA, 118 bp, Homo sapiens
  misc_feature (1)...(118): n = A,T,C or G
ggacgcatcggcgtgganccatatatttaccgcctcgaatcagannanttnganctctggtaccccgtggancnaagatnctattcgggaagattcntattntctacaaaggatagga

SEQ ID NO: 1955 - DNA, 118 bp, Homo sapiens
  misc_feature (1)...(118): n = A,T,C or G
agggccttggcaaganagcaagaagtgaacaggaaatcctttctttttttcttttaactcacaaagattatttctttttatttatctattttttctttttattacactccagatttta

SEQ ID NO: 1956 - DNA, 118 bp, Homo sapiens
  misc_feature (1)...(118): n = A,T,C or G
tgaagtggggtctttcnggaaggcnctgancaacgtgctggcagccatganganngcggcggccaagcgggnntgatgaaccctcccccaataaaagatggttcctacaaaaaaaaaa

SEQ ID NO: 1957 - DNA, 118 bp, Homo sapiens
  misc_feature (1)...(118): n = A,T,C or G
caacacgtgaatatgaanaccttgaggngccatncatattntatatatattatattaccattatttgtacatgntgaattacccattatagctgtttttattgacctaaaaaaaaaaa

SEQ ID NO: 1958 - DNA, 117 bp, Homo sapiens
  misc_feature (1)...(117): n = A,T,C or G
ctaagtgagccctggctgacctggaanttgcngacttaccagatcagnctgnncttcancncacagaggncngcctgccttctcctcnctagctgtttggnttatgggatgcaatta

SEQ ID NO: 1959 - DNA, 117 bp, Homo sapiens
agactgaggacatgcctgcctcctgccccatgcttcctgccataacaataacggactgaaccacctggaactgtaaaccagccccaattaaatgtattcctttgtaagaaaaaaaaa

SEQ ID NO: 1960 - DNA, 117 bp, Homo sapiens
  misc_feature (1)...(117): n = A,T,C or G
cagcaaccacacgggcggcntcacaancctctgtaatgancgctgntgccctctttctggngngtctgaaganagntacagtgtaccttacatataactnaataattcttttttaaa

SEQ ID NO: 1961 - DNA, 116 bp, Homo sapiens
  misc_feature (1)...(116): n = A,T,C or G
tgagatagagaccaggactctactagaagaaagcactgannataancccaagagaccgaagacagacacannagcncatcgcagtcttgtgacnggngtaacctcctgcaggacat

SEQ ID NO: 1962 - DNA, 115 bp, Homo sapiens
  misc_feature (1)...(115): n = A,T,C or G
ctcaagacccatgtagacntgaatcgtangcccanagcccttccttcatncttgaggggcagncactgntggcatnancgcnttaaacaaatcctctcctcttcaaaaaaaaaaa

SEQ ID NO: 1963 - DNA, 115 bp, Homo sapiens
  misc_feature (1)...(115): n = A,T,C or G
gcgctgcctgcgtactatgaagagctcacacnnttcggccacactttctantcgctnccggncnattactncacgcaggnaaagccngcntcccactccccactctccttccata

SEQ ID NO: 1964 - DNA, 115 bp, Homo sapiens
  misc_feature (1)...(115): n = A,T,C or G
ggcaatcgataaatatnttgggtctgnttctcanacgtttgtgtnnttgtagcaagactggccagnagngcaccangactctggncggnaaccatntgtctgcctggccccgccg

SEQ ID NO: 1965 - DNA, 115 bp, Homo sapiens
tgtctgcctggatgctgccatgcttcccgccttgattaacctgatgataatggactgaacctctgaacttgtaagctagccccaattaaatgttgcccttttataagaaaaaaaa

SEQ ID NO: 1966 - DNA, 115 bp, Homo sapiens
  misc_feature (1)...(115): n = A,T,C or G
gagcacctgctgggattnattcaagccaaactttaatgatgangcttgnggggacgagcanagactgaagngnctggtcnacattnnttctgcanttttgtgggtccccactccc

SEQ ID NO: 1967 - DNA, 114 bp, Homo sapiens
  misc_feature (1)...(114): n = A,T,C or G
tcatgatgacgatgaagaactctcagcagtagatatantaactcctgaaccacacctgcctggatgntgctgagtncccgtnttgaggataatgcacctgaacctctgaacctg

SEQ ID NO: 1968 - DNA, 114 bp, Homo sapiens
  misc_feature (1)...(114): n = A,T,C or G
ctgctgctgcctgctgctncctgctgctgcctgctgctgcctgctgcattggtnaccctccccagcatncctgnanagacaccatcccantgttttatacaacaggcaataagt

SEQ ID NO: 1969 - DNA, 114 bp, Homo sapiens
  misc_feature (1)...(114): n = A,T,C or G
ctccctggtggggttttgcgccncgggccnntgctggacncctgtggagccctgggcncntgnaagggtttttntaagttaaaanaactttttttaaaaatggaaaaaaaaaaa

SEQ ID NO: 1970 - DNA, 114 bp, Homo sapiens
  misc_feature (1)...(114): n = A,T,C or G
ggatggatcgcggattgtttgaantaggaganaacatatcnttccggggananctgnatgtaaaaangatctctccgnatgagctacggatgngaangatatttgtgtcccatg

SEQ ID NO: 1971 - DNA, 114 bp, Homo sapiens
  misc_feature (1)...(114): n = A,T,C or G
gactgagcgtctgcccagggtcagagntcgccctcccccaaacgtgaggaacaactccgggaaaaacgtgagtgtgcccttgaatttccaacaaaacccagctccttgaatccg

SEQ ID NO: 1972 - DNA, 113 bp, Homo sapiens
  misc_feature (1)...(113): n = A,T,C or G
gactgagggaggagacntacatatgcanatgaagcctgcgggacacccagcccagacctcccagggaactttggaagtccnagtgctgcagcaaccgaaggacaaggaaggtt

SEQ ID NO: 1973 - DNA, 113 bp, Homo sapiens
  misc_feature (1)...(113): n = A,T,C or G
ttaacacatttagcatactatgtgtnntgcnaaggatnnttanaagtnntacaaagganatacaagaacacttatatatngtcttttaaaaatctgaaatagagcatatgact

SEQ ID NO: 1974 - DNA, 113 bp, Homo sapiens
  misc_feature (1)...(113): n = A,T,C or G
actgagtggacagacttgctgagnnctggcggtgctgatgggtcatctcttggttgcttggggctttctgtggaggttgacgcatctactaaaagatatgacaaacaaaaaaa

SEQ ID NO: 1975 - DNA, 113 bp, Homo sapiens
  misc_feature (1)...(113): n = A,T,C or G
aaccacagcttatagacaagccgagatttacanggcactttactngagtagcatgcaaaagggaataatggcccgtggagccaacaactcaataggaaatgaaaagaaaaaaa

SEQ ID NO: 1976 - DNA, 113 bp, Homo sapiens
  misc_feature (1)...(113): n = A,T,C or G
tttccaaactcacttctttaaaaanaaancgtnacgngcttgganaaangncttcagcctgtctaaaagcttngggngagntcccttatttcaatttcccagcaaccacatgg

SEQ ID NO: 1977 - DNA, 113 bp, Homo sapiens
  misc_feature (1)...(113): n = A,T,C or G
gtgcacctttcgtactggaccagagattattcggcgggaatcgggtcccctcccccttccttnataactagngtcgnancaataaaatttgagccttgatcagaaaaaaaaaa

SEQ ID NO: 1978 - DNA, 112 bp, Homo sapiens
  misc_feature (1)...(112): n = A,T,C or G
aatatgattcttttcctgtganntgtggctgntgcaaagctgagaaatccttctnaacaagacagntgnctgganactggaggactggntgngcattttctttcatttataa

SEQ ID NO: 1979 - DNA, 111 bp, Homo sapiens
  misc_feature (1)...(111): n = A,T,C or G
gactgaggcatctggacnccttacntttcaataagcnttttctgttantaaaccagnnttcgngtctcaggtctctgccatttgctaccacaccgcccagcctctcctgag

SEQ ID NO: 1980 - DNA, 111 bp, Homo sapiens
  misc_feature (1)...(111): n = A,T,C or G
tcttcttccagcatgtgtctaccagggatggagctnatgcctgnnngctggggnggctagtgtggattactaaaactantcatgataggntgcnaaccaaagaaataaaaa

SEQ ID NO: 1981 - DNA, 111 bp, Homo sapiens
  misc_feature (1)...(111): n = A,T,C or G
tgcgtaaggtctgacagaanntagngacagatactggcaactacagcanctaccggcncangcntgtcagcctgcgtgggcttncgctttcctatcctgggagccttcttg

SEQ ID NO: 1982 - DNA, 111 bp, Homo sapiens
  misc_feature (1)...(111): n = A,T,C or G
tgacctgaaacttgctnngtacaccangctggcctccaacttagaaatccgtctgcttctgcctcccaagtgctgggantaaaggcgaacgccaacagtgaaaaaaaaaaa

SEQ ID NO: 1983 - DNA, 111 bp, Homo sapiens
  misc_feature (1)...(111): n = A,T,C or G
gcacctttctactggaccacgagattattcggnggnaatcnncncccctcccccttccttcataacttggngtngcaacaataaaattagagccttgatcaggagggacaa

SEQ ID NO: 1984 - DNA, 110 bp, Homo sapiens
  misc_feature (1)...(110): n = A,T,C or G
gatcactgaagaggttcggtggatgttngttcgagaggtatgaanggctgggggnnggananagaggcnggttcgcnnatgcggtantgccttgcgcccttttttcccct

SEQ ID NO: 1985 - DNA, 110 bp, Homo sapiens
  misc_feature (1)...(110): n = A,T,C or G
cgggtcataaccatccgtaatgananctgactctntnttntggaatgnctgaggacagctacagngnacttatatataataaataaataaatcttttttaaaaaaaaaaa

SEQ ID NO: 1986 - DNA, 110 bp, Homo sapiens
  misc_feature (1)...(110): n = A,T,C or G
gactgagggtttactatgtagaccctggtcgcctggtctnctangtgagttccaggacagccagnnctatacagagaaaccctgtcttgaaaacaccaatgaaaaaaaaa

SEQ ID NO: 1987 - DNA, 110 bp, Homo sapiens
  misc_feature (1)...(110): n = A,T,C or G
ggaaccagcccactggtggaacctgangagccacacacagtgcagcttnctactggaccagagantantcggcgggaatcgggtcccctcccccttccttcataacgtgg

SEQ ID NO: 1988 - DNA, 109 bp, Homo sapiens
ctatgtagtcctgagctcactatggagaaaaggccccaaactcacagagagccatctgcctctgactcctaggtgctgggattaaagacctaagctactaaaaaaaaaa

SEQ ID NO: 1989 - DNA, 109 bp, Homo sapiens
  misc_feature (1)...(109): n = A,T,C or G
actgccggactacacatatacagactcacaatcaggtcanaatatntttaagactnantgnacactnnataangtgggggcgggatcaataagatactggacctggagg

SEQ ID NO: 1990 - DNA, 108 bp, Homo sapiens
  misc_feature (1)...(108): n = A,T,C or G
gacgatgctttcccaaantcacagggnctccttcatgcctcccatttgcacccacagggccctgccttgnccccagcaaggcctgacccacctggctctctggtcatg

SEQ ID NO: 1991 - DNA, 108 bp, Homo sapiens
  misc_feature (1)...(108): n = A,T,C or G
gagacatggaatttctttgtcactccaaaactacnttcatacacnncgttcngntgaatcttttcaatcctnaggatgcttaactgcttgcaacccgatgcccccccc

SEQ ID NO: 1992 - DNA, 108 bp, Homo sapiens
  misc_feature (1)...(108): n = A,T,C or G
cctcccgggacctgactgagtantgcacgctntccctgtgcctcagtaggccnncaggatatcccccntgtcaccctcacttggataaacggtttcttgttttggcgt

SEQ ID NO: 1993 - DNA, 108 bp, Homo sapiens
  misc_feature (1)...(108): n = A,T,C or G
taaaaaacattacatggccnagcataactacccgccccactccaacctagngaagaattcaacttngctgaaccttcataccctgctgagaactagtggaccaataaa

SEQ ID NO: 1994 - DNA, 108 bp, Homo sapiens
  misc_feature (1)...(108): n = A,T,C or G
ttccttggcgctggacactngaacgtgagatcctcaggcagcnctnatggtntgcgtncaanncagccanacgagggaaagatataaancntttattatatttacata

SEQ ID NO: 1995 - DNA, 107 bp, Homo sapiens
  misc_feature (1)...(107): n = A,T,C or G
aagaagccctgcaatggtntgacccntgaccttttggcccntgtgggancacctaaacantagggtccantgtaaccctgccttgtgctgaaaaaaaaaattttttt

SEQ ID NO: 1996 - DNA, 107 bp, Homo sapiens
  misc_feature (1)...(107): n = A,T,C or G
gaataggcttattttggaagaactcacccaacctagccacctgggacntttgatttacccaccttataanaaagtttgnaaaanatctnatagtactgattatcaaa

SEQ ID NO: 1997 - DNA, 107 bp, Homo sapiens
  misc_feature (1)...(107): n = A,T,C or G
tgtgcacctttctactggaccacgagattattcggcagggaatctgggacccctcccccttccttcataactggngtnacaacaataaaatttgagccttgatcaga

SEQ ID NO: 1998 - DNA, 107 bp, Homo sapiens
  misc_feature (1)...(107): n = A,T,C or G
gactgagaatggtccaagaaacaaagtaaaatcttcgtaggcaggattgtctgcnancacagtagnggaagnngtaaagcagtatttcnagcatctttggcaaggta

SEQ ID NO: 1999 - DNA, 106 bp, Homo sapiens
  misc_feature (1)...(106): n = A,T,C or G
tgtgtcgtacataagaaagcatncatttatattntgacaganntcagtggtgtccaagcatctgganagtgccnnccagcatgaggccttgaagtatgtagggctg

SEQ ID NO: 2000 - DNA, 106 bp, Homo sapiens
  misc_feature (1)...(106): n = A,T,C or G
agcactcgacagactttctcccnccccnctttnaccatcttgcnncaancattctaactaatntaaggaaactgacaatctncccaaacactctttaaataaaaaa

SEQ ID NO: 2001 - DNA, 105 bp, Homo sapiens
  misc_feature (1)...(105): n = A,T,C or G
ttttagtacacttacgngcttccttggaagagcatncctnttcactctncacatncaggtcttccacttgtnaagagcacnttnaannaacacatctagtcctac

SEQ ID NO: 2002 - DNA, 105 bp, Homo sapiens
  misc_feature (1)...(105): n = A,T,C or G
cacaagctgccatggnagctaggccgaagctganggatcaanaattcaaggcctggncaacctcaccatgagatgctgtcttgatatataaaggaatgctgagaa

SEQ ID NO: 2003 - DNA, 105 bp, Homo sapiens
  misc_feature (1)...(105): n = A,T,C or G
cagtgccctcttctgggcctgtgcatgtactgtgtggcataccgctgtggcgtacacgacatgctctactgaggaaaatggcnatatgaataaggtaaagatgcc

SEQ ID NO: 2004 - DNA, 105 bp, Homo sapiens
  misc_feature (1)...(105): n = A,T,C or G
attcatgcgtcatgatgatctcttacntctnggngcgtcaanagannnctacntggatctcttagccnnacccttagcgtatagccctcaacacgtcagtataat

SEQ ID NO: 2005 - DNA, 104 bp, Homo sapiens
  misc_feature (1)...(104): n = A,T,C or G
ggcagaggggtcacaaagtctgtttccctgctgatgaggcanngagggcctgggatccaagcacacaggagcaggaagcaggaggttntcaactttgaggccgg

SEQ ID NO: 2006 - DNA, 104 bp, Homo sapiens
  misc_feature (1)...(104): n = A,T,C or G
tctttcccagcaaccacatagnggctaacanncntctgtaatgagatctgatgcccacnttcaacagtgtacttacatatacaaaataaataaatggttcttta

SEQ ID NO: 2007 - DNA, 104 bp, Homo sapiens
  misc_feature (1)...(104): n = A,T,C or G
ggcagagaccagctgccgtcagnangattactagtggaanagnntgtgtatnaangtcngtgggaaacctctttnctttgcctgnctatgcagccaccacctaa

SEQ ID NO: 2008 - DNA, 104 bp, Homo sapiens
  misc_feature (1)...(104): n = A,T,C or G
actgaacaatagcatcaaggacagcgntacgacnacccagcatnngctatngactnatgcatnatgacngaggcctactnctacaggcaggcacattgctcata

SEQ ID NO: 2009 - DNA, 103 bp, Homo sapiens
gactgagaggaccttggttacctgcagcaatggctgaaggcctttgtgggtgtcttcgagaagactatctcgttatcctccctggaacctcgaaaaaaaaaaa

SEQ ID NO: 2010 - DNA, 103 bp, Homo sapiens
ggccctgcagcaccacctgcaaatgtgcaatgcctctgggtttcatggtttttgtttgttttgtttttcgtttttaaagaatttataagaatttttgcatttt

SEQ ID NO: 2011 - DNA, 103 bp, Homo sapiens
  misc_feature (1)...(103): n = A,T,C or G
tactggaccagagattattnggtagggaancngggtcccctnccccttccttcataactagngttgcaacaataaaatttgagccttgatcagaaaaaaaaaa

SEQ ID NO: 2012 - DNA, 102 bp, Homo sapiens
  misc_feature (1)...(102): n = A,T,C or G
gaccagtgaattattgagccgtnctgnctctgtgtcatnantgtcggnattacagncatgcactaccacactctncttcttaaaataattttaatggagggc

SEQ ID NO: 2013 - DNA, 102 bp, Homo sapiens
  misc_feature (1)...(102): n = A,T,C or G
ctgacgttccgtcccagcaccnacngggtggcttccgcnccctnctgtgcggcgaacgcantgcccntnntctggtgcgtctgcggacgcgccacccgtgta

SEQ ID NO: 2014 - DNA, 102 bp, Homo sapiens
  misc_feature (1)...(102): n = A,T,C or G
accgtggcacagtgtgggnnccccctctccactgctganntgaaaactgacccccttgttgtcaaataaagtgtggcagctttgcagtcgcaaaaaaaaaaa

SEQ ID NO: 2015 - DNA, 102 bp, Homo sapiens
  misc_feature (1)...(102): n = A,T,C or G
tcagtggcgtgtagacatcaananctgaggntggatcaaaggctatggttncnaanccctggagcacgcagcagtcaggcctttgaggtggatgtggttgaa

SEQ ID NO: 2016 - DNA, 102 bp, Homo sapiens
  misc_feature (1)...(102): n = A,T,C or G
ctgagataaaatgcttcatttggccgacttgngnggataaatcatccttcatttggaacacctgagcttctgattcttcgntgacactgggtggatgtgaga

SEQ ID NO: 2017 - DNA, 102 bp, Homo sapiens
  misc_feature (1)...(102): n = A,T,C or G
cctttctactggaccangagattattcggnagggaatcagggtcccctccccnttccttcataactggtgtcacaacaataaaatttgagccttgatcagag

SEQ ID NO: 2018 - DNA, 101 bp, Homo sapiens
  misc_feature (1)...(101): n = A,T,C or G
gactgagacaggatgctccaantcccctgcngctnctcttcganagaaagacgaggagtgctctgcncctgccggtangaacagccctttttgacttaagg

SEQ ID NO: 2019 - DNA, 101 bp, Homo sapiens
  misc_feature (1)...(101): n = A,T,C or G
gaaagccacttaaaaatccanctgtaanacatttccttaattanngnttgacatggggaggactgagcccattgtgaggggggttatccctggactggtgg

SEQ ID NO: 2020 - DNA, 624 bp, Homo sapiens
  misc_feature (1)...(624): n = A,T,C or G
gactgaggtggaagagcaagctttgangagcctgcaccatggccatanntcattgaacnagatngattcgcacgcaggttatccggccggttgggtgnnnngnctatnctgctatgantggacanancagacnatcgggctnctcttgatgccagcnngtnnncggcgnagcaccncatggngnaccnaggttcttttatgtcangaaccganctggcctgctnccctggatgagctagcaangacanangnaangccggntatcgtgggcttgngncangacgggncgttncctttgcgcagcttgtgctncgaccgttgtcacttgaaagccggggaaggggacttggctngctattgggccgaaagtgcccgggccaggatcctccttgncatctcacctttgcntccttgccngagaaaagtatccatcaatnggcttgantgcaatggcgggccggctggcatacgctttgattccgggcttacctgcccatttcgnaccaccaaagcggaaanaatcgcaatcgagcggagccaccgtacttcgggatgggaaagcccggnctttgtcgatcaaggatgatcttggaccnaaaaagcatcaaggggcttcgcgtctcc

SEQ ID NO: 2021 - DNA, 576 bp, Homo sapiens
  misc_feature (1)...(576): n = A,T,C or G
ttttgaggatgcccagacttcagnttntaagaagctggccttcagccatccaaggtangaggccgtcctacnaggtagatntgccatgncacaccacaggnaagggnngntgtgaaanggccgntcnatcntacctctggcatgctcanggtttctgncgctcatagagatctgttctgtgaataanctnactgncncggctgnggttcaccctggtccctnncagcagnagnacgnngggatnctcatcgaatnnttgttactnncaaggccncgcctccaaagaagcggcgcaccggagctatcgctacacagacatgagagagtaganntcngtngactccaccgacgaacccacncggnnnntntncntggaanctggtattatgctcttacataccgnngtacaagactgnatgttaagctgtacttgctgcgcgtgagctnacctgttcacacngctctcacaggaggctangtttacanaggatgtatgtnaanttttacctggctgagctnacactgggcctggactaccctgcacagnttggagcattatttacaaaggacctcatg

SEQ ID NO: 2022 - DNA, 568 bp, Homo sapiens
  misc_feature (1)...(568): n = A,T,C or G
tcctcatgggtgccanctccgggaacncngncnaggttgnccctggtcnatggaaaggatncggagatgaatgngacggtcgnctcngcncggcggntcnacaggancnnggcgnncccggggtncggccngaccncggtgcgcagcgcntangcnacntctgagcattggnccaccctncagtanntgcnaggcanntcggtcgacntcaannagnagtctntttggtgcncccccccacccaaccccaagtctanngagaccttttgttctcccgttngtttccccttttgnttnatcttttgttgttttgctttgttttnaagacagagtctcactgggtagcttgctactctggaactcactactaaactaagctggccttaaactctaaaatccacctgccaatgccttctgagagccaggcttaaggngtgcgctgcccactcccagccttaacccactggggcttttccttcctctttcttttattanctttttatctccccttaccctnccgncatnaataggnacttaattttgtacttgaaatttttaagttgggcca

SEQ ID NO: 2023 - DNA, 563 bp, Homo sapiens
  misc_feature (1)...(563): n = A,T,C or G
tctcatgaaggtgactttctacttgcancagangaataccatcntngttgannacctcnaaccntncnnagngnnanngcgtggcaccagngaacatatctacaaaacacnttctgcacctaaggctcagaggaacatcggaggaanaggaggcagagaggtcgnatgggccagaggatcanataattttntgcangacatgtcaatntcagagtantgtcagaagcnacacctataaaaatntcactaataggactgnccaattgtgagcatgaacaagaacagcaccaatggacatgccaaagtgggcnagaagaggccangaggacacaacactacacaaagaactgtnggcaatgaggcacgctggaancgggggaggcaaagtgtccacactttggtcttcgttctnttgagtttaatgtgttagcaaattaattgtatcttatgtcttgggtatcctaagtttctgggctaatatccacttatcagggagtacatattgngagagttcctttgtgattgggttacctcactcaggatgatgccctccaggtccatga

SEQ ID NO: 2024 - DNA, 561 bp, Homo sapiens
  misc_feature (1)...(561): n = A,T,C or G
aactgaggttctccagtgantgcttttcaagcaacttgacctgtactttccacctgnggcctgcacctgtcaccaagcgtgaactgaccaaagangcagtgtctgggagttctgagaganaatgtagggtcgtgaaaagcaagcaagancatcagaccgaagcagagtaagccaacacatacaacaaaatggtgtcctggataccagagccttacacagctagccagagaaaagaactacaacctcccctcatagccagaagcaacacacaaccacagaaaccacactatggagcctacatacagctaggctggcaagcagagatgctcaagtgaacagtcttccacgtcttatcagagaggggcctgaagaaagttcggtccttaattcactaaggggaaggttgtaactttggggctttggtctgcgagtactgacagtagtctttgcttccagaaatccagttaacctgaaaagccactgtgacttaacctttgtggattactggatactggcagtctaaccccttccacctatggagactgatacggtccaaggaag

SEQ ID NO: 2025 - DNA, 560 bp, Homo sapiens
  misc_feature (1)...(560): n = A,T,C or G
actgaggtctgtgatggtatttcctggaggncagataagtggtggtgatcttcccctggagtcggcagcagtgggccagcctctgttcctccttgctggtgagggcctctaccctatagtggaactgctgccatcaagacatcctgaagctatgccattgaccaagaatggatttgaacttaggacctctggaagaggtcagtgctcttaactgctgagccatctctccagcctgaaggaacatttccttatgaacccctaccatagctacacttccaacttgaaacttagaaaacttgacaagactgaggctgtgactctagtgggatgtgtcctgttatctcctcccatgacagcgtgacttcatctgggtgagatagcatctgctggatcacctctcttgtaaagttatcatttttcaaagaattcgtagagagatgctttgaacctgagttaagatctctcattcctcgttcaatgtttattccatcaagatttagtaaacataatttgccaaatagatcattgctctgacacaactccttgtaaactttatttgt

SEQ ID NO: 2026 - DNA, 560 bp, Homo sapiens
  misc_feature (1)...(560): n = A,T,C or G
actgaggtcgtggtgggtcaanattagtagaaatccaanatacaacgaacactaggatacaggtnataaaangaaatcctgaggcagaaatcaaaatttttggtngtacagccatgcanacanaagcaaaaacagtgatacgatantgtngttananaacaacaataattacattccaggacaaagagttggtattattgcattccaacctaccgttgnagcagataccagcacaagtgagagtgtaacagacgatcagccattgatagattgggatcaaattcgagaagatgctttgaaatgggaaaagaaaaagtgggcaggaaagaaaattttaatataacatgtgatgacttgaaagatggtgagaagcgtccttatccccaaccctatatgtaaatttgaagatgcctttcaaagttacccagaagtaatggaaaacattaaaagagcaggctttcaaaaacctacaccgattcagtcacaggcatggccaatagttctacaaggaatagatcttattggagtagcacaaactggaacagggaagacacttaaaa

SEQ ID NO: 2027 - DNA, 560 bp, Homo sapiens
actgagggctaaccgtgtgtctcaatgtttggtccaacacatatgttcacaatggggaagcagggcgaacagacggcgaggcttgattcgcagtaagaagtcaggacgctgtgtttccttgtccggagcagcccatgttgcacctgatcgagggtgggggaagacatgaccacaggagtacgaggtcaccctggagtccacagtgagaaagcaggcaagcgagcgctcgtgctcagcttgctttctctaagcctaggatcccagcccacagaacgctgcaacccacccaccgcctggctcttcatcagaaatgaaatccttctggaatcgccctcacagacacactagaggtgtgcttcctcagtgatcccaaaatctagccagaataggtattcatggaagccaagaaaagttactcaacccctgaggatcatgacccagacagggctggccttggatgtgtcttgcaagatatcctattctcaactctgagatcagttctgatgagttcctgacacgcatggacccatacagtgtctagtgttgcacacacagaaagc

SEQ ID NO: 2028 - DNA, 560 bp, Homo sapiens
  misc_feature (1)...(560): n = A,T,C or G
gactgagacccaagtctgcaccaggccagtgagagatcccatctngaaaaagcacagtgtggaggttgcctgaaggaggatgtccgaggacgccctctggttcccacataaacatgcatcctcatgctcacacccctgcaatcatggagacaccatatatgcatacatagactggcttctcagggtctccatgacacagggtctccatgacaacaggataaccggaaggaggaccggngaggatccaatactgatggtgtcccagaagccagagccttggaaccagagcagtgactcactgcaatgaccatttgcaagtgaagatgcgtggacagagggatagactgcaggacacaccatgacacactacagcttccacgatgagatgtttttttatgctttggtttttgttttgctttgttttgtcttttgtttgtttgtgtgtcctttattttgggtgagaggttgaaagagccaagggtggatatgagggggcagggagatgagcgagattgggctgcgcgatgtgaaactcacaaagaatcaattaataaataaat

SEQ ID NO: 2029 - DNA, 560 bp, Homo sapiens
  misc_feature (1)...(560): n = A,T,C or G
actgagcttaaagaatgaccaaaaaaaggaaacgccaagatgattttcagaaagtaaaactaaaagttggtaaaaagaagcccaagttagaaaatgctacagctacaaactttaagacaaaggctatacatttgcctgaacaacttaaagaggatagaacaccttccgacaaacaatagaaagccttaacataaagganctggtgacncntatgcancagntatangangagntgttanacaaatgtgctcntnttggncttaangaccntttgantcannncccatttataatggatggcacanctctcaaacntannnagtgangngactcgcgtgtgggagcgggcngnnnntnctaattgntcggntagcancagttcaacttcttcaanttcctggcccccaaaatacaaactgaacacatttctccattttttcctttgggaaantgcccatctctntaanagccataactcacattactgaaagaattcaggaaactctcttaaaagtncnnggacattctgcngggancattatgccagctctcatttactt

SEQ ID NO: 2030 - DNA, 559 bp, Homo sapiens
  misc_feature (1)...(559): n = A,T,C or G
gaactgagatctggtggctcctccaggcaggcaacagctccctcgggtgttgagtgagctaggcaccaactggaagagtgagagctgaaacgggttgcctgaggcggatcaaaactcgactgatgctctctgggattgccgggcagcggacattcctccggcccctccatctgggctcctgtggataggaggggccgggcaagcangccagcctgggctatgatttggtgtctncgtntgaccgtcctcagcctgatcatcagccagggggctgacggncgaanaaagcctgaggnggtctctgtggtgggccgngctggggagagtgcagtgcatgggctgtgacttgctgcctccagctggccgtccccctctgcatgtcatcgagnggntgggctttggattcctgcttcccatcttcatccagttcggcctctactctccccgaattgaccccgattacgtgggacgagtncggctgcagacaggagcatctntccagattgaggggntccgggtggaagaccaggcttgnaaccnagaaaggggatcttcttgc

SEQ ID NO: 2031 - DNA, 559 bp, Homo sapiens
  misc_feature (1)...(559): n = A,T,C or G
ctggggagctcctgcattaagtcagactgagtcaaccgatnttaaggaancatctcataactgcaagcaaaggcantacttgattgaacngganggacagacagattaaggaacttcagcaggcattaacagtcaagcanaatgaagagctgnaccggcagaagagaatangtaacacccgcaagatgatagaggatctgcagagtgagctcaagactgcggaaaactgcgagaaccttcagcctcagatcgacaccgtcacaaatgatctgaggcgtgtgcaggaggagaaagccttatgtgaaggcgagatcattgataaacagcgagaaaaggaantgctggagaagcagagacggagtgtgagtgatcatattacacggtttgacagtcttatgantcaagaaggaagatanagctgagacagcggtaccgggntacgtatgatgcagtcttgtggcctgagaaataacagngacaggtttanacaaagagtntgtgaacccataatgctnacggtnngaaagtggttactcattttttgtacattttgttagtt

SEQ ID NO: 2032 - DNA, 592 bp, Homo sapiens
  misc_feature (1)...(592): n = A,T,C or G
gactgagagtctctgcaggaggtatcactccagacgggcagatcatgctggcancaacaggggtggctganaagtgaaaggngccagctactgaggaggggccccagcagcccctaaaactcctatcaggacatggagtatgaaagacgaggtggtcgtggcgacnggactgcccgctatgtgagccacgtgatcgttcacaggatgatangtggacaganccgcatgccggnaccatgattatagagacatggactacctgcctcatacccacnaggagtatggcangtcaggagggcnagcntgantatgacnactcatctgaagagcntagttgcatgagtatcccgnnnncagcgtgcgagtncgcatggnagtccangcacggnagagaccaggactgatgccgnaacaaatcgctcaggtcatgagcacgnggcgttcgccttcgnctgagcttagtcnctttgcaggaccgctacacggatggatnggaaagcccaattcaccagctcncctcaacantcctggggccngaaggtntgcattgcattacaagcngaccccaagcccaagcatcaatgaggacctg

SEQ ID NO: 2033 - DNA, 556 bp, Homo sapiens
  misc_feature (1)...(556): n = A,T,C or G
actgagtggggtctttcactcgcctacgagtacctgtgcgcgctgcaggactccgtgccgntgcccgccgtgcgcgcctgcctgcgggacggcgtgctggacttcaatgccgaccggctgcgcgcggtggactgggcaccgntgntcagcacgctcagggtgaaccgcgacctgccgctggnggccatcaagagctncttccagccgtggctcggggaaacagttctgcggtccggaggtgcgaggntttggtcggagaagtgggagcccggtgcaggatcancctgcgaagcggcctccacctagccacaaaggagtnnttgccgccgcctccnttgcaggnngccgcnnaggancanagnctggantagtnaagctagggagnagaactnnacactgnctnttattacagcgaggatgaccaactctgcacccnnaggggaanatgcagtgataatntaacaaatggtccntgccctntnttnttttaggggttnaaangtacattatccnttaattggnaattgcaagnctaatacataaaaggagaaggtta

SEQ ID NO: 2034 - DNA, 556 bp, Homo sapiens
actgaggtcttcgaagggcatgattccccagtaataatcctcgccctgatccaaggtgcaggtcgccctcccttccagggaagactgcttcttgtgtgacaccggccatcgaaagagactccgatggacttacaccgggcagccttcaagatggagaactcatcctatcttcccaaccctctggcgtccccagcactgatggtcttggcgtccactgccgaggccagcagggatgcctccatcccttgtcagcagccacgaccctttggtgtacctgtctcagtagacaaggacgttcacattcccttcaccaatggctcctacacctttgcctctatgtaccaccggcaaggtggggtgccgggcacttttgccaatcgtgatttccccccttccttactacacctccacccccagtttgctcccccaaacctagattgcaccccaatcagtatgctaaatcacagtggtgtgggggcattccgtcccttcgcttccacggaggacagggagagctatcagtctgcctttactccagccaagagactcaagaact

SEQ ID NO: 2035 - DNA, 555 bp, Homo sapiens
  misc_feature (1)...(555): n = A,T,C or G
gactgagatcctgtagggctgggagtcgactgcaaaaggagagacgaaaaattctttggtcatggcacaactttatccccgctgttcatgctgtcactggcaaacacccaacaccacgacccttgtgaaacgccaggctgcgcgctgtttaccattgtggctgtgcactgtttaacngttgtctcggagatcaccccactgcccgttcccccgtgatgaactctgtctgaaaacatctataggcctgcaggtggcaacagcactcctaaatgggaaacttcagatcatcgaagccggatgtacttagaaggatgcgtccatgtctcccactgggaatccatgagtcttcactgcaccgaatagaagggatgcagagccctgcctagtcagcctcgccccaccccgccatgtctctgtatttctcttctggaagaataaggaagcggtcgcgcccaccaacacaaacacactctttgttatttgatttttcctagctccattttcaaccacaatgtcatccccctgctaccccgcccacccttagtgactttctgg

SEQ ID NO: 2036 - DNA, 554 bp, Homo sapiens
  misc_feature (1)...(554): n = A,T,C or G
gactgaggtggggccttgattaanccgtacgctncccgctgatactgctgngtangngagnngctncanatctccagnctgntggngagancncctggcacctgnagtgtctgcagnctggctngnatcanngatgagnggngtcatgaggcagangcagcgtanngnncatgnnnccgccctanctgcgtccccacntnacaaccaccacaagcctcttgganggaaagggtagagattatgttacctcctgcaggtgcctgcaccagctgttgcttcaggncncactctncttgctctttctccaaaccctgaaaagccaaaacgaaatggaaggtttctgcagtcaagggtgtaagataacanaacctaggagccggcaccacaaggaacatggggcaggaagcgggcaggaagatcccagtttacttcaaactgctctcagcaagggatgcgagcagttatctgctccactaccatcacccgcctcaggagtgggcttccggcagctctgaagcaccacggggtgacagtctaagttgcttttattgcca

SEQ ID NO: 2037 - DNA, 553 bp, Homo sapiens
  misc_feature (1)...(553): n = A,T,C or G
gcagcttgccctatcnttggggccctggagaccngccccagganngccccnatggtnncgntttgacntngcccctgnngngaggccccngcncctcgngttggccaccgnctgcttccgtctttccccccngttggtgntgccnaagcgcgggangcgcttcattgtcgggggancaaatccaaaccaaagtttatcanatgtacacaccatggacttggnaacacaccagtgngacacggccaccagggagggcctcttgcctcggtacagagcatgccagcttccttccctcctgctctcctcacagcatctgggtgtttggaggtgcagaccagtcaggaaatcgaaactgtctgcaagtcatgagtcctgaanacaggacgtggagcacaccagaagtgactggctcccctccatccccaagaacattccacacatcgtccgcagntatcggaaaccaactatacgtntttgggggagganagagaggtgcccancctgnggaggacgngaagntgcatgtatttgacgcaaacactctgacatggtc

SEQ ID NO: 2038 - DNA, 552 bp, Homo sapiens
  misc_feature (1)...(552): n = A,T,C or G
gactgaggttctcggctggaccgggttggtggcctgaatgtattagctttgctctgtctgcccaagaggnaagagatgtggcttgcaagttctgcatttctatgctctgggctccttgctttcctgagtccctgnccccggcctncccttgggggnggtcaccattgcnnngngctgantntgctncccanaggngacattctgcctggcattntatttnctntgagtgntncgnggcttcttggacaaacaagagtgtctgggtgtcagtggccttggtctgtggtnacttagtttacatctttggggcaggagtgcatgatgatggggtatttgagaaagntaatgataccattcagccatctataaaangggaaccannggccaagtaagatggcctcaatggctaaaggggggcttgccaccaagcctgacagaccttggttcaattncctggacccacatgggggggaagaacagagtcctgtaaggtattcctttnatcttcacacacaaaccaanagcagggcaccccttccccaacaggatacc

SEQ ID NO: 2039 - DNA, 551 bp, Homo sapiens
  misc_feature (1)...(551): n = A,T,C or G
gaactgaggcttgcttgggaanagcaacagtcccgggcggacgcagcaaagcgnttgtcttctctntctctggccaagcngaanttttaatnacccntgtggagtaatggcctcagantagcataatagaaacagtgccttaaanctacttggcgaaacacagcccagggaagancaaaaagcacttnggagactacctcatccttcgcactgggtcctacagcanaggggaanagaggnggncttgnctancttangggctgtgatnaatgantaggacagtgtatgtgntttaaactgaanccngcccncactttttggaaggtnatccnttccanggngctncngccnggtnctcncnattttaaacccgtnacaaagtggagagaagcagatttgatgcaagtaatttccgagtctttggatagggagagtctttccatcatcagcattaggagctgaatcctgaacccaggactgctaacaaggcgatgggcaaggtcaagccacacctttaaccctttctggtttcaataaacaaacaaacaaat

SEQ ID NO: 2040 - DNA, 551 bp, Homo sapiens
  misc_feature (1)...(551): n = A,T,C or G
gaactgagcttgaaaacnctacacatcaaataatgatctgctacantgctaccccgagcntnaccttccacantgcctgtgcaggcagctcantggacatnagtttntgncctgtccaatctgntataatgaatttgangagaatgtgcacaaacccatcagtttaggttgatcacactcagtntgcaagacctgcttgaataaacttcaccgaaaagcgtgtccttttgaccagactgccatanacncanacattgatgtgctcnctgtcaactttgcacttattnagttanttggagcccangtaccagatcatcagncaataaagttaagnaatctaggngagaataaacactatgaagtggcnaaaaaatgcatagaggacttggcactctacttaaaaccactaagtggaggtaaaggtgnagctagnttgaaccanagctccctgagccgtccaatgcagaggaaactagttacacttgtaaactgtcaactggtggaagaagaaggtcngtgtnatagctatgcgagcgggcccgttcacttta

SEQ ID NO: 2041 - DNA, 550 bp, Homo sapiens
  misc_feature (1)...(550): n = A,T,C or G
gactgaggactcctgccccagttctctgcctgagcccagttccccagctgagcccagccctccanctgaccctggctcccccgtttgcccatcccccgtcaagcgaacaaagagtncaactgttnatgttggncaacagccgggcaagatcccctcagaggactccgtctctgagctccantcctgcctgaggcgggcaccggaagttgggagcccaggcacgggccctgagagcccgagtccaagagaatgctgtggagcctagtnccccagatgccaaggtgcccacagagcaaccatgtgtcgagaaagctcctgcctaccagcgcttccatgctctggctcagcctggtctcccaggccttgncctaccctacaagtatcaggtgctggttgagatgttccacagcatggacaccattgtgagcatgctccacaatcgctctgagactgtgacctttgccaaagtcaagcaaggtgttcaggagatgatgcgcaagcgctttgaagagcgcantgtgggccagatcaaaaccgtgtatcccatgtg

SEQ ID NO: 2042 - DNA, 549 bp, Homo sapiens
  misc_feature (1)...(549): n = A,T,C or G
gactgaggttctggcagaagagctgacaccaagnaggaacaagtttctgaggccgttaaaacttcacagatattcttagccaagcatggttataacancattggaggntatgnnngagccccncncaccnnntcctnncnccagacagagacattggagcangctgangaacctgcatttgcatgtctttaaagagcctggaaatgaaggaaagcatccgggactggacaatgaggttcaagacaaagccagcttcagtgatgccggccctcaccatggaaggggacgtggacagaatccaccagcaattaatcaggccagcatccattcagccccaggtctgagcaacgttnggantgagnatacaagggacctcagccgctctctttgttctgcccgagtgaaccaggagccgcaaccagaccagcacccatcctctgtctgctggtacatggaaggccaggaagaaagtggaggtggagaacggattttcaaatttagatccttggaaatttaatagaaagcaggaacgtgcagctatggcttggg

SEQ ID NO: 2043 - DNA, 547 bp, Homo sapiens
  misc_feature (1)...(547): n = A,T,C or G
actgaggtttttcctctgaggctatgtggaaattaacggtgatgtttaaggacaagaagaataacctaaacaggagatgtcagatgtaaaagaaattgagagcctactgtagaactgccacgatcttctcgagtggacttccatgtagagcagtacttttcattacaggtctgcgtcctcttctgcnaaacgaatcttaccggaaattagataatgctgctgattttgctggctgtgcttttagaaactcaagatttcttggcctgcttcggaaatgagctcancacctcagttttaaagaaaagaatctgaaaatagcttcttgttctccttggtgtgctccaatggttttacttctgctttcacctaacccggctcctgggctcagcgctctgcaatccaatctcactgtggactcctgtctcatctntgngtctctgaggcacctgtctggtgtgataatagaatgagtggagtacgggncctcttaacgactgacttgttccanaacctcagaactgaagtctgccaaaagctatgatgccag

SEQ ID NO: 2044 - DNA, 546 bp, Homo sapiens
gactgagaatgcaagaagctgactgatggatccctgagctgccagatgactaatgaaaacttcctttaaaacgtgataaagctctaatgtcagcacgatccacatgatccatgtgcctcctataaagggaggggtctgtcaccagtgttacggattgaatgctacgtttatcttccaacataggaagcctgccaggcaaacctagcacagaaaaccagctggattttccctgtgcatggtttgaagagtcagtcctacataattgctgacacaatgcaacctgcaactgcccggagaaagaacagttcactaaaatttgttgtatttatcatccaattctgttctgtaactggtaacactagtttgtctggctttagagaataggtgaatctctaaaacagtagaaacagctcagttgggcaagggccgttctagtagcatgcctgctccttggagttttccagattattttgtatagcctattccagattcttgtctaagattgctttgctctgtgcactcagaattggtgtgcctttctatata

SEQ ID NO: 2045 - DNA, 545 bp, Homo sapiens
  misc_feature (1)...(545): n = A,T,C or G
ttccaaccactttgaagcccactgggggaaattctccatgcaaattctcangacagctctgcnccttcaaataaccatgagatctggccctggagacgatagnatgatacccacactccanaagaaattccacacntttataaaaattaaagaacagtagtgcttaatntgntanaggacaggncnantntataaaacctgaccgctctagctncctcctgagcgggatagatcncatactnagcactaatcanaactggcntnacttaggncgctaccgaggggaagtggggcaaaagcnaagnnggaagnacagntgatngaccccacagnngcaggccttacctcanaagcttggnagctggaagcngngtccnactcttgntgcggatccntnntanccgaagntgatnaccgaagtnnggcnccanatgcgttccgaagaaccttacacctgantnnagccaatncaaaatctgaaggnattngctggcncccantttaagcaaggntnactaagggaaatgngattaccaaatgccttt

SEQ ID NO: 2046 - DNA, 544 bp, Homo sapiens
  misc_feature (1)...(544): n = A,T,C or G
aaccctcagcagaatacaaccctctgatcctgnacctccacctccataactgtgggctgaataaacctttgttctttctaaacgaccctgcctcctgccttctgtgacagccataaaanattganggaaactntgacttgagcanagaatctnccagcntgtgacttgatctatgggcnatgagtggcaagtttgttgatcanaagaatctttgctgccttgtttctgccacctggctgacagtcacctgaagatgngtttcagaccctgganatatggcggcacaagccactgtggcatgcaggagatgtgcacttgtgcgttnnatgtttcctagatcagaaccaagctncagcccaggaaacacctgttnctgnaantaaaggtntattagacagatggaatgctgctgncnaaactgaaagaaaggaaccaggctcggnacctgccccccctggnnccaacccccaagctctagggccatggattgaacatcaaggaagtcagggtttctttcatgagaggggttggaggcagccctgct

SEQ ID NO: 2047 - DNA, 540 bp, Homo sapiens
  misc_feature (1)...(540): n = A,T,C or G
gactgaggtaccaacgaacagcgttttcttgacttccttcccaatgtctttcattctaaatatattaagaaacgtgctggaatattttggtgttcccgtagaccaggatttgctgatttgtcaaaataaaaactgtgggtcagcctcgganaataagancntattattgggagaaggcattcctttaaaaccttgcanaagacctcattttgagttgatcccgcatgtgaactctacggagtctgatgattatgaacttagggttccatcttttgctgacgttttatgtgtggcaaatgatgaagaagccagttgtctcagatttcgacatagtctatggcaaaagaaggaagaaagaaaaattgctcctttttatccttcaaaactaacttgggatccatcatcacctggtctaagacagaacaaaacagagacagaccgatctgcctgtaaatgaagctgcaattaaaaagatagcctgcccttgnagatgagctgaccttttctccggtctcagattgctgcgattgtggcaatgca

SEQ ID NO: 2048 - DNA, 540 bp, Homo sapiens
  misc_feature (1)...(540): n = A,T,C or G
agactgaggcaattttcgggaaactgaaaccagcttatacgggacaaacagactggctgtcatgagtttccatctgaattgtggagatggattaaaaacgtgagagagcagtgaagaaagatggtatccggttaaggaccagggaaacgaacctaccctgccctggcagaggggcgtggctganaggggcgtggctgaggtagagaggggcgtggctgaggtggatagggtcgccctgaanactgctgcctgtggcccgagaagcctccctagggtagattggtaggagctgancagtgtatgattctgganaaaggggaagtgtngctcaggtagagggcactgcacgaatcaacatccaggcggcgccntagggccaccacggtgctatgctactactggggagaggggcaggctgcggncatgtgcttgnattggggtgctgcgcatggaaaanagggnggaanaattcntccatgctggctccagnanttcagggacagggcttgntgtttcctgtggcacccacagccaaggctg

SEQ ID NO: 2049 - DNA, 539 bp, Homo sapiens
  misc_feature (1)...(539): n = A,T,C or G
gactgaggcatattggggtnggaaattncngcaacaaatgggtcgcccantgtgagacttagaanncaactaagggttctacagagagctacggagaggctccctcccaagccccaagcnanncanagcacccagagacagctccccanccatgagctgggacttacngtgccacaacncagggtgnnccnanccctaaagaaagaccaaggaccctgggttatgactgcctgtaanacagccntcacaactaaagatcancaactaaanaactgacagttaactncacaaagccttctcacagatgtaataggctctatctgggactctccgctgagcaatccttcttgtgcttgatttcctatatcctccacgtctaaacaggacgngggacagtcagacccgctcttacactacngactacctgagactgacacgcatactgctggacataacctaagacagagacaaaaccagaaaaagctgctggtctctctacagtgagcccctcccttcaaataaagaattagagagaaaaa

SEQ ID NO: 2050 - DNA, 536 bp, Homo sapiens
  misc_feature (1)...(536): n = A,T,C or G
tccactggatactcgtccagagttcttgcttnncttgatnatacctgtatatgaatctganngaccgtaactgnccnaagaaagaccgganaggctggagcggaacgnnncgnaatggangaccaganngactgattgantnaagtnttccnatggnacgnnagattagacngntcagancgngcacgcaatggattgacacaatncatggncacctctgncntgnngatntttacngtggnaaantgttnnaatgtntaaggtanatgcttnaccaattgatctctccccagccctttgtattgtaatgaattgaaatgaatgaggctgggtgttgcttaatggtatttatctagcatgttttaagatgctggggttttgagtcccaaccttggggaagggaaatttaaatttaaatgattaactgcacagtggtgagcnatcgagatcntaattttttggaaaccnttcaaagaggttcctatttacaaacaccttanacaaatggtgagctagacagagataatggtaattaa

SEQ ID NO: 2051 - DNA, 535 bp, Homo sapiens
  misc_feature (1)...(535): n = A,T,C or G
cagaaggaagacctcatcagtgcattngggacagacgaccanactgaantctgcgagctnattttgactaanggagangttnaagtgtcanataaagaacggnacacacagctgnagcanatgtttagggatatcagccaccattgtggcagacangtgtgtgaacccagaaacaaagagaccttacaccgttntcctcatcgagagagccatgaaggacatccactactccgtgaaacccaacaagagcacaaagcaacaggctttggaagtgataaagcagctgaaagagaagatgaagatagagcgggcccacatgcagattgcgcttnatcctgccanngaacgaagggaagaagctgaaggagaagctgaagccactgatgaaggtggtggagagtgaggactacagccagcanctggagatcgtgtgcctcatcnacccaggctgcttcagagaaattgatgagcctaataaaaanaggaaacgaaaggcaggggttctctgggaagtgctcaatctgaaggacgtggc

SEQ ID NO: 2052 - DNA, 530 bp, Homo sapiens
  misc_feature (1)...(530): n = A,T,C or G
atactgaagtcgactctttccttcttacnatgttcttatcctaccaactcagcnacanaggaagcacaggccnaatnacaatctatgcatctcagtgcncngcctacttcgcacagtgcctagttctgggtcacacacacaggtgcatcattttgtattaactgccataaaaagtgaaatgcccaacgccatggtttagaagtctagaacacgctaaacctgggagaagaggatgttttatttttatgtagcctccatttcaccttctcccgaggaacctacaagcaagcagcatgtattcattttgctttcaaacatgctagactcgaggaacagaaccgtctggaactcctgcagtgaccagtaagataaagttcctacatttgcccctgtgggtaaggtacctgtgctgagcttcatagagcctaagtgttcatgttcaaagggtaggaggctgaaaatgcaaggagttcccaagctcacgtcttctagttcagacttggtgtctctatgattagaactctaagtct

SEQ ID NO: 2053 - DNA, 530 bp, Homo sapiens
  misc_feature (1)...(530): n = A,T,C or G
actgagcctcaccggcatatgctgttgatcgtcttgaccgtagccgttcagtccaaggtgagatgaaatctcagagcaagtatcatgtgcatgaccctagctgccaaggatgctggatacttgtgaacttggccatttttattcttcttttgggaactctcttcagatccacagacgatttttaatttttttaaattgatttttttgtttgtttcttagtactttgtatattctgttattagccctctattgggatttatagctggcagcttccctcccacgcttcctcttcatgtggttgattgcttgccttactgnggagaagcatttgagttttcctaggtcccatttgtcgactgttggctgtgattccggagcaaatggaaccccgttcagagaatctttcctgcacctgnggttccctttcaggaatttcagtgtttccgctttcatgttgaagcctttgtcccattcaacgtagaaattttgcacaaagnaatagatattgcatctaatttcaaaaaaaaaaa

SEQ ID NO: 2054 - DNA, 528 bp, Homo sapiens
  misc_feature (1)...(528): n = A,T,C or G
gattgtggttatggagaaggtggatatgcacactgcatagtctgccctccccganagtataaaagcacgttggggacatcacagatgtcagacatgcatcacttgtgctgtcatcaatcgggtccagaaggccaactgcacaaatacctctaatgctatctgtggagactngtctngcccaggttctaccgaaagacacgcattgggggcctgcaggaccaagaatgcatcccatgtacaaagcagactccttcttccgaggttcagtgtaccttccagttgagcttagtgaaggtagatgcacacactgttccccctagggaagccacacttgttgcactggtgggaagtctgctagtggtntttgctctggccttccttgaactcttcttcntttattgcaagcaaatcttcaacnatacnttggcaatgcannaattatatctatttaatntttcacataaatcannaattaaaacngggctttttnttttnttggtaaaaaaggactttttctaaaaaaaaaaa

SEQ ID NO: 2055 - DNA, 527 bp, Homo sapiens
  misc_feature (1)...(527): n = A,T,C or G
acttgaggtttttgaatccagtgaagaatccggggagtcttgtcctcacgngcgttgtntcaggtcacttcttcntttcccaagggcagacactgctggaagggttttcactcattggcagcaaganctggttgaagantgtaagacgcatggactgtcttctgtttggaacaacaataaagaacaagagccgaatgtttcgtgtccagtttagtggggagtccaaggaagaggcgctggagcgctgctgtggctgtgtgcagaccctggcccagtacgtcaccgttcaggagcctgacagcaccacccaggagcttcagcagagccaaggcccccgggaggcaggtgaaagccaagggaaggacccactgcancaggggccctccctgaccctggagcagcacgtgtgtatggcagctggggcaggtgttctacaggaaaggacctnagtgacacatcgagntcagtctatcctggcgccagagaagctgaccctcgcctatgaaggctcttcatggggaacagaa

SEQ ID NO: 2056 - DNA, 527 bp, Homo sapiens
  misc_feature (1)...(527): n = A,T,C or G
tgaggagctgagaccacagtaaaaccttatcaatgatccctctataaaacggcacagaaactgaaagcagagagtcaaatggataccagactgcccctgttcctcgcgggttgtntcacagagccaaataatggatcaacccagggcccatagacagtaaacagagtatggtctgcaccacaatgaacttcgtattattcaccacagaagagaggcaggaggcaaggggatggatggagcagcatatagaactccttgtcactccgccctgataacctgagttccatttctgggacccagagaaaggaagcgtgagagaagcagctcccccggtgagcaccatgactctcatgtgcacccaagcacacaggaagacccttgaccacgggtgctaagtgaaagaagccagaaacaaaagactccgctaaagcaatggatgtggggagagccagccagatcagaggcaaaggagagtggcgcttacttgggagctgaagggagcttggagagttagtacctaagaggca

SEQ ID NO: 2057 - DNA, 524 bp, Homo sapiens
  misc_feature (1)...(524): n = A,T,C or G
gactgagatgcaaagangcctttccagaacagnaacccagacntgtgagccgctggncgnacacaacagagnantgantgccatgtcacttttcttgctgtccaaaacaccttcaacagtgcctgagtacatcaaaatgttctgnttaatgtactctggagcagatctgnggccttcctgaagactgaattgagagangcctnatgccgtgtgctaggttggttctctaagacaaagctatggtctcagtctacacacacaaacacactcgagaaatgatcttgacaagtggccctgagtgctgacttgtaacttgctgtgtagctcagaccagccttgaacgttcattcctcttgccttagcttcctgagtagctggggttatagatctttaccactaaccaaggcttggctcttaagttattttggaataatttacttgnactttttaagcttcattttccacaactgtaaaaagcaagcaaccaacaaacagtccctgtaaatccaattttggtctacttt

SEQ ID NO: 2058 - DNA, 524 bp, Homo sapiens
  misc_feature (1)...(524): n = A,T,C or G
gactgaggtgggtttganctgctgtagcacactggccagnggccatattnactgcttgagcngcnntcaaggncanacaggangcttgctctggtnccttagaanacacantcnnatggncttggctcaggacanacgtntagtngtgaaangaagaccttntgacctgatacccagagcacaggcctgcagggtccctgggaaagggtggacctctggacccngcagatcgtcttgacccagccttganataccaacatcagcntgctngggcatggancgcttgtcccaaaatggcaggaagaanagccttggngtgccgaggattntntacctcgccaggaagaanaagacagggaccaggcccttcagtacngttctaaacatccttttcgnntcgccctgcgctcgcnctgnattgttagtgatgcanctngcntgtgggcntgctagagtctgtncactaagcngggggaagtgacagacagatgaagtcagagcaggggagggagcacagcctggga

SEQ ID NO: 2059 - DNA, 517 bp, Homo sapiens
  misc_feature (1)...(517): n = A,T,C or G
ttcaccgcaaagagctccccttcaganctanatcaggatccnnacgccgagnaaagccagtacntccgtgcagcagtntgtgncaaattgctttctctgacntccagtgccactaggagacacttgcatccttgcntangggcaanaagcccgttctcctgccccgagtgtggctttacagttcgctcgcctanacaatttgaaggcacacttgaaaatccacagtaaagagaagcacacggnagactccancagtgtttctggcagctaatggtggacgagggcaggaacattcttcagctgcaaccataccagctctccacgtaanaagagcaggagattcagcttcttgtcaccgactctgtgcataacattaacttcatgccaggtcccagccagggggtcagcatcgtggctgccgaanagcccccanagcatggccacagacccggctgccaacatcaccctgctcacacagcagcctgagcagctgcagggcctgatcctttccgctcaa

SEQ ID NO: 2060 - DNA, 512 bp, Homo sapiens
  misc_feature (1)...(512): n = A,T,C or G
gactgagttactgaagttctgagtctgcatcacggnaagtgtctttgngcattggatgatggtgtaatacanaaatncacaaatggntgaagtgcanagantactgtatctgngaagngctctttaatagatgaagcatctgtaccacaactcctgatacttcagctcaaggacagnggcnggangagggggcngaaagagtgtaatgagcctanaagttgagagcgaatccatgtnttctggatatcacaagactgctgatctcataagcccacggaagccatgggttttttaacacgatcaagcctattaangattcacgtatgaagagagatgggttcataagnccctacaactaattgagaanctatngagngttgtttactacttggagaaggaangccaaatttntttaaggatntgattcctggtaggnngaccatattccaaagnanggttntacacccacanangcataagtaaaactaacnggactcaatgggatacttttt

SEQ ID NO: 2061 - DNA, 509 bp, Homo sapiens
  misc_feature (1)...(509): n = A,T,C or G
tctgatgcatcccatgatggccttgaacttgctatgnggctgagcgtgaccctcctgcctccatcctctctccctgnagggattaccaccatatncagttttatgtggtattggggatngaactcagagccttctgcatgtgaggcgagcacctgtaccaacctgagctaaccctcannccgagaatctgctacccaggaaggaagntgagttcctnatcacgancttacaaggttccatttaannttgcctcctttgatantctctcttcaactntcagnctcaaccaactcaaaacatcanctgcanatagatcaccatttncttttnccagagcctgttaggcttactgaagatgaagcaccacgactgatggnctagtaactgaanaacaaaatggtccccatgtacaatcctcttctttacattttgtatttanaacccaggcactgattatgggtctccctataattgncctgattaatggggagtaatttcctctggcatat

SEQ ID NO: 2062 - DNA, 508 bp, Homo sapiens
  misc_feature (1)...(508): n = A,T,C or G
ctatacaacagccaacgcggagtctgattacgagcgggactccgacaaggagagtggagatgctgaggacgaagtgagctgcgagaccgtgaggatggggaggaaggactctctggacctggatgtggaggctggcgtccagtccngtcggctggcccncnttggaggaggatgacctcctcaggccgagaggatgtgcagctggtcctgctgcaggccgatgagctgcaccagggcagcgagcaggacaagcgggaaggcttccagcctgctgctcaacaataagcctggcgtatggaagccgacaagactttctgtggcgcctggcccgggcctacagtgacatgtcagaccttactgaggaggagagcgggaagaagtcctacgccctaaatggaaaagaagaagcagagggcttgcttctgaagaaaggagatgagagtgctgcgtgccaccttgtggtantgcagtgctctgtggtcagcttggcttgagcattgagggcatt

SEQ ID NO: 2063 - DNA, 505 bp, Homo sapiens
  misc_feature (1)...(505): n = A,T,C or G
actgagtggccagctgccgtttgaggcgatgtctgccctggttgactcagaaagtantnngnncttcaccacnctantagtaagcaatganccttagcnggcttgcactgaggntctagatcngntngagatcgancncatcacgacttctggttgctgncaacactgctggtgacntagctcgcctatagtgggctcngntacgaagaggtacntncnantcacanggggaaagtnaaatttgctngagaggattgcataacttgtgatgtaatttccagagnaatgcgttgncangtccagctacgcntttggcagatganggcaagngagangaacctcacccatggccacntgagcctggcatatctagcctttaatttnttnagaggggactagatggtggcntgnggactacntgtgggcgggctacnttgcttnattaaaaaagggatttcngacattctatgtgggattggtagccatcttaggacagcttagaatg

SEQ ID NO: 2064 - DNA, 505 bp, Homo sapiens
  misc_feature (1)...(505): n = A,T,C or G
gactgagatttattaattttatgcatatnantgttnctgcctgcctgngtgtgtggacaccatgcttgntgcctgatacctgtganggccaanaagaggccatcanatcccctggagctgnaatcagngaagactgttgagttaccatgtaggngcttgggaatcgatcccaaggcctctggaggggcngcantcaaaggctctgaatcaccaagacatgactaaagctcccanattttctattggaaaanactaaaagaaaanctnattatngcgngcgnntggagncatatcncgagtgangaaggnnagaccactnctggngngattnaagncaganncantncatttatatnacnangcgtgcaccnttactgcttctactgctaaaccatctntntggngccnggatttaattatttttactgaggactgnaactgccanaggtgttctggcccatnagataactgggttgctaccttgggttntaattccaataaaaaa

SEQ ID NO: 2065 - DNA, 503 bp, Homo sapiens
  misc_feature (1)...(503): n = A,T,C or G
gactgagcttatctgagcatccattatagaaaatggtcctgagggaacttctgacgtcagcaggaatgtttgaagacatttgctgcgaacaaggaagcaatagcctgtgcctgctggtctatgatgcctttacacctcagtggttctgacaacagggtgcttctcataaccttctgatggcctgcctgaagctgtgtcctctccactgctcccaagatggcttgaatgatcgtatctatcccgaggctgagcacggnaacgccaatgcttccaaggananaagtcccgatgngagctagcacananaccancttgctaattatgccagttgngacacttgagcccaccagtttaacagccactgcactggctgcanatgtagcttntcccaggatgacanaaatgaccttntgcacnatggcaatnttttccgtntccctttccttaanatcctgcagcttcctataaagngtnggctntagttggtctttcaaaaaaaaaaa

SEQ ID NO: 2066 - DNA, 501 bp, Homo sapiens
gactgagatgacttgtttttcctactgagatatgtcccagtactacagacgtgagctgtagccggacttcccccttctgaagctgctgagctgttagctggtggagggagggacaggaggctgtcccagtcccatgccatcccaaagaaacccaggtcaacatgcagaagttttcaggactgtcccctgtgtggccaggtggctttgcagggaacaaaactccttccattcctgggctgccttggaatgtccctggaagaagttgcatagacatactgtttgctcttcctggccctcagttggctgggctgcaagtcaagagtgtgacatctgcagcctgggtgagactgagcagcacaagaaggctgggacaatgacttcctgtgcaaacaatgcctgcttcccatgtgagatctgagtttattcccccagactgcgaggggagaggcagcatgctgaataaagcttgtcacctaaaactttgacatggaaaaaaaaaaa

SEQ ID NO: 2067 - DNA, 500 bp, Homo sapiens
  misc_feature (1)...(500): n = A,T,C or G
gacgtctggggagctcctgcattaagtcagactgagagatacgtgattgacttggaggtgggctcacagcacttgatccgatacaaaaccatcgcacctcttgttgcttctggagcagttcagctaatataaaacaaagcaagcctgaggacatggagtggtcacagacaatattagaaacgccatcttttgtgtctaatagtgaagtcatgttccatacagttcgtcagcaatgtgtggaccacttggacgtagaaaggcgccgatgcagaattcccttcgttgtcacagccttctcctaaattcctgtttaaccagcaccaacagatgggcccgtgctctgaatactcagcaaataaatcaacagtcaggtgtgagccttttatttttctactactttactgagctnannagggggccgcgaaagaggctacccctgccctgcccacgatggccagatggacctggggcataacttgatgattacagagcttccttta

SEQ ID NO: 2068 - DNA, 499 bp, Homo sapiens
  misc_feature (1)...(499): n = A,T,C or G
tcgactctgacaccgcccactgctggnanntgaggagccacacncgtccnnctttctantgnaccaganattattccngcggagaancgagctcnangtacccgcttccttcatnncnggtgtnccatgcnatnganttngagncttgatctcgacgnatgatggatctcacggntgaaggacaccccacccacccccaacaaccccagatgacctggacttgcatgcttctgtgatttcaatgtgttccccaaagttcatgtatttgaagcttaaattcccagtggacataccagaggcagaacttacagaaaggcacagggtagaattgatgttacagagtgtgtcaattacctagaaggtggatttgtaatttaaaaccatgcttggncctctcttacctactctcctcctggaatgatgcagaaggaaggttncttgccaagctgtggnctcctgatcttagaccttccaacttctaaatctcaaaccaaatata

SEQ ID NO: 2069 - DNA, 493 bp, Homo sapiens
  misc_feature (1)...(493): n = A,T,C or G
gactgagttttcttcttatggaaatcaaggcagtcaaggctatggacaaacaccacaaggttattctggctatgggcaaacgactgattcttcgtatggacaaaactatggaggttactncggttatggacaagatngatcaggttatncacagtcgtatggtagttttgagaatcnttaagcagagttcatatggccagcaatcatacaataaccagggacaacaaaacacggagtcatcaggaggtcaaggtggaagagcaccttgatatggccagncagactatggncagnaagattnttatgaccagcantcaggntatgatcancatcaaggctcatatgatgagcannccaattatcanccaanatgattcctataatnaataaccaacanncttaccattcacaaaggnaaaantacanccacccancacacaatataatccgcgcnnaatttaatctaagtatgnaanaacataatacataatat

SEQ ID NO: 2070 - DNA, 493 bp, Homo sapiens
  misc_feature (1)...(493): n = A,T,C or G
gactgagccggtgtccagagatgacgaggacgtggcattttattctgagaagccctgggaactgaacagtggtggacagatcctctgcacagccacattggaggagtacggacccagggtccagcattttagcatgtcccttctagcagagactatgtgactttgcctgtgggtatgtcatgaacccttgcctacagcagcacatggacagtttcatccctgctggctcaagtccccaggaagagcctatgcctacaggtacagcagtgtgctagtgaacatgagtgcccagggacaagacagactttatanaagtgtaaggaacatcatggaagcgtttccaccgtcaagaccacatggttcgctccttcagtatttctgctgattttcctctatctaaaaagaatgcgaacagggacatacagagcgattggatggctcactgtgccaacgggggccagcantaaaaagggaagaagtctaaaaaaaaaaa

SEQ ID NO: 2071 - DNA, 487 bp, Homo sapiens
  misc_feature (1)...(487): n = A,T,C or G
gacttgaggtgctagcttgcnctccttggcctgggagctgggagcctgtntgaccccctgtgtcacacctggcgggttttacagcggtgccccaccttgntgcttggntggaagtcatcacccttacagtgtgggtatcaaggggggagcaagggggctaggaagctccanagggattaggtggnctccagncactcccctatgtgtgaaccctgnatgctnttccantctgganctgnaaagctgtcagcatgccacgccatggtgccaancacatagaangacttcaagcntgtntgccctgnacttgnctgctcttgactgacttcaaagccttgtcccccaactacccacacggccaccttactcaacagaaatattcctgtgatagagacagaagggccccctgttggtctggagggtatggggggcattgatctccccactatncaaaccagacaccttatctctaaaccatcatgcacct

SEQ ID NO: 2072 - DNA, 487 bp, Homo sapiens
  misc_feature (1)...(487): n = A,T,C or G
cagctcatgacccgagcctttaagcagatcanctgnccctttacctggtgggaggcggccacaaaccggatccagccgncatccaaggagactgacgaacgcccctctttgaagctgcacagttcacttggccccctccaaacaagaccaggggatacacagacaccatgcntgcagtctcggatgaacacccggctagttttgattttctcatggnacaacagannccatnacangnnnnacgataatccttggattatngacactctnaacaatgttggnggaaatgataaccttaaganacncccattggaggtttcacaaacaccccntgctgctcttnanctgtataatgangaatgnagcgggtgaattncacntctaanaggaannncagcacagtaaggactngggcntgancctttgagactgnccgaccttgctggnctacagttctactgaaattaattaaatgacttcaagagtt

SEQ ID NO: 2073 - DNA, 484 bp, Homo sapiens
  misc_feature (1)...(484): n = A,T,C or G
ccagaagagggggctggatgcnctggaantacaangtggaaggaggaccaccatgtggatggggccctggtccatagaacgggcagccagtgctctcacctgcctgagccatctctncatctctcttctctctgacagaggaacctctctagctctagctttgaaagtgccgnggccgcccaagcactgagattgntggcacacccnacccgccgtccatgccctgnattntatattttccccagctccgcagtcttctctcctncctctcctttccttctggagnttaaatgcagagcattgnatactaagcccacacccttcctcctgcccagaaaccattctgtatgggacagaagacaaggacgcaagcccttcttctttgnagaatngtctagagctatggntnttaacctttctaacncnnntgacactttaatacagnancctcatgttgagntgaccctcaaacataaagtacaag

SEQ ID NO: 2074 - DNA, 484 bp, Homo sapiens
ctgagcccttcctgagctcccccaatcttctcattgctgaacaaaaaaaggataaaccactctactggaactctggcagacgacggctgttttagggaaactgttactcaactatgagatacttcacatcgcaaccccaatgggtagcctttcaagacaaggggaagaagattttgatctttaattaagggcagtaaacagggtgcttgttcaaaactcagggaaggtttccccaaactccttggtggagaacaccaaggcttctctgaggtgttctgagcctcagccagatcttgtaacagattggcctgattcacttttcagagctacaggccacgccatgatctctgccaacacctgagccaggtctatggggagtggcagctcctccccagaccagcagatggaagggaaatgtactcaccttcattttaccttcaccaagtctatgaggaattaaaggattttaagatgaaaaaaaaaa

SEQ ID NO: 2075 - DNA, 479 bp, Homo sapiens
  misc_feature (1)...(479): n = A,T,C or G
cagatgtgcgtctggtattttaaaaagnatcatcaccattatcatcatcgtcatcgtcatcatcatctatgtgggggagtactgatattttgcctgcatatatgcctgantaccacatctgtgagntagacagttgcngagacaccatgnatatgcgtgagaactgaacctgggtcctccagaagggatagncngtactctgagcacggctttctcgacagattctgaacaacagtnttcaacttagagcttngaagatgatagaagtccagaatattcaaagctaatctgtgtattagaatgagcaataggaagatccgtgtctggtgggcaaaaaggcccaaagaaaattaaagaatacaccatgcagagctgctggtaggtaaccacggggcatatagaaaaccatcaggtttttatggagcaaaacaatgaacttgacaaaaggaacttggaaaatttagtaatcataggataaa

SEQ ID NO: 2076 - DNA, 477 bp, Homo sapiens
  misc_feature (1)...(477): n = A,T,C or G
ccctatgccaggtggggcagnntgcagagagnaanagaccctggcagcaatggtctgtgacactggatganagnnagactcagcaagtgacgaagatgtnacaacaaantaacttacacaactggatagagacgcttgcccacagngagaacncngcagcataatggagatgaaggccgactgggccaggagtgtatgggagatgatcangactttgaccaccagacacagaggacgcctgctggaccctgcncgaatgcagntcaagatncgatgcangntaannagnnagnncctannaagngngtatccacgccncatacctgnnctctgnccgtttccaaggngagggcaacttgtgattagggcctgggtttcatttctgtaccctcctncatcttcctttgctggcctctggccttttgacacatacntaaggaaaccttcctaaaacaaaggntaaaaatacttccctta

SEQ ID NO: 2077 - DNA, 474 bp, Homo sapiens
  misc_feature (1)...(474): n = A,T,C or G
ctatcttaccagagatgtanctgaacatattttncttcagtgcttttctcctgngaaacccactatggccaggaactgctctgagngcntggagaagcgnncagnacacatcctctgnacatacatgcaaccgntggctgngcagcctcctgcacagaggagcaccgncntgtnccagccccggngggcccactntttgcacgggcacanaagggatcctnaggggtgaatggtggntctggggactttgccttgtactgccctctgcanacacannaagtgctcaagcttttctgcgagacgtgcgatgtactcacctgccacagctncctgatggtggagcacaaagagcacagatgcaggcacgtggaagaagttctacaaaaccagaggatgctcctggagagtgtgacttcccaggnggcacataagaaatccagcctacagacatctgcaaagcaaaatcgaggacag

SEQ ID NO: 2078 - DNA, 474 bp, Homo sapiens
  misc_feature (1)...(474): n = A,T,C or G
tcaccatgcagcattagcacacattgggagacaggcngtcnatcacagggtgattnactgagcnngnnnttnnngaaggcgaatatggtgcnnncttccttttgtttcnnatggtggtggctnagaagcnaaantgcttggnnanagnccttctggaacaancatntgntgtaaaggaaggacagactgacanggnccacactctgnngncnagctgatgngacccaaancctctccaantnttnctgctcctnccactgangaaggtgtacccttgggtcatgccctttgatcctgcatttatcacctgtatctagatcttcattaagaaccaacttcattaagagacttgtntacctgggccccagatcctctgctctgtgcggagctgaaaggagccgggtctccagtacgcagccctgagccctggcccagccaccttcccttccattanacaccaccacctgttcctgg

SEQ ID NO: 2079 - DNA, 473 bp, Homo sapiens
  misc_feature (1)...(473): n = A,T,C or G
tggtggcattcaatcaaaacaaggccctcatcggtgaccggggcctgctgccctgcaaactgtacctgaagaatgtccaggagtacttccagggcagcactggctgggctgcctggacctatgcaccaaccattatgtggntgntggactggtcagacatgaacttcaacctggacctcattgctcttcttgggctgggcatcncgtnctttgtcctggtgaccggctgtgccaacatgatactcatgactgccctctgggccctctacatgnccctggtcaacgtagggcagatctggtattcttttggannggnncnaccangcngaaacanaccgagttctnnanaacntnctgagcactctctngcacnctgatcccncctgctcaataacaccccaacntcccagangggactgaggngcttncccatgnctgatctgananaaacaagccttggaccagggatatca

SEQ ID NO: 2080 - DNA, 472 bp, Homo sapiens
  misc_feature (1)...(472): n = A,T,C or G
gactgaggcctggctgtccgaggtgaaagcctccctctttttggtcctccggatccctcgtccatagaaatcctctggactttgtaccgcaaagtgaagtcctccagatggtcgcttgggtacctgtccctggccgaccatggcctttcctctgatgggtacagcatgactgaccttacccaggaaatcatcaacattagcttcacactcatgaggcccttcctgccccagctgcttctgcctagttctcagccttgtatcctgctggaaaagcagaccatccagctggnnanccacgaagngggnagatnntacaagggtnnnctccacagccagcccctgctcctattcanntccatganggagnggnngagngtcnanatgnaatacaaatnccaagaccncnannnncatncgtagtcnnangncngggnaaaaacctnnccnatnatntangagatgccacctcttg

SEQ ID NO: 2081 - DNA, 470 bp, Homo sapiens
  misc_feature (1)...(470): n = A,T,C or G
gactgaggctgatccagggctttgagctgaccaactccaacatctaccccattgatgaactgctggagctcgggagcttcggaaggggctggctgtccanacccaaagccgnaggatctccatgacacaggggccagaagaggagagctgagaggaatcccagtgaggatccntcagtgacagtgcagcaggcagccagaggcctcganccagaccaatgactcactanaatgaacatacgcangtaaagctatttgggcaaaagggtgtcctgtgggacacactgtgacacactacagcttccatgaccagatggttttgctattcttgttgtgcttttcttttctttggatgggagtgtgtgttgcaagggccgaggtcagatatggagggtcagggagacnaataggatttccggggcactatgtgaaattgacaaagcaccaataaaaagtttttaaaaataaaaa

SEQ ID NO: 2082 - DNA, 469 bp, Homo sapiens
gaggcgtcaagcacggctgcagaaggagcttgcagaagcagcaaaggaacctctacctgttgaacaggatgatgacattgaagtcattgtggatgagacctcagaccacacagaagagacctctcccgtccgagctgtcagcagagcagctacgagacgctctgtctcttccatcccagtcccccaggatatcatggacactcatcctgcttctggtaaagatgtgagagtcccaactactgcctcgtatgtcttcaggcactagagaaatagttcatgttaaaagtggggagctagagagaagactcaatggttaagagaactagctgctcttccagaagacctgagtttgattttcagcacaacatggcagcttactactgtcctgtgattcgaagacttaagttggataaaaaacttcaatgaagttataacctttattaaactcaattaataaacttaaaaaaaa

SEQ ID NO: 2083 - DNA, 468 bp, Homo sapiens
  misc_feature (1)...(468): n = A,T,C or G
gactgagaaatggaaaccctccttccggcacgtgncaggaaagcgaantcccctggcggtcagacccaggctnaggacntttccgtggtagcagggagnntctctctcatcatatggaatctgtgtgcaattgaagcatcctggaaacggangaaaagaaggcaaggaaaagcctggacngcctctgaagcgnagcgacaatctngatcctttcctatncaatctgttnccccaccccccantttggctgcatggctggctatctgtaccacagaactnaccacgacnctccatgacactgngnttctgggngtcccatttctcangatggaaccaaagtccagcccagagncctatctgcatcccacactnccnttacagttatgtnnnagtgctcatggtngtgactgnntgnngacatggnggggctccaggacctataggccagaataggatccaagctgaact

SEQ ID NO: 2084 - DNA, 465 bp, Homo sapiens
gactgagcagaagaccccacttgtgagcatatgccagtaccatggtatgatcttcaagaatagcagcatcagtgaagtggatccacctgagcctacagtgctgcagaagacagagctggaaacctgaagccagccccttggaggaggccagaagacaggaaagaccccatcagaagaggaaaggactgacagaacctgaaggggattgcaaccccataggaagaacaatatcaacccactggaccataaagagcatccagggactaaaccacctatcagagagtatatatggagagatgcatggctccagctctatatgtagcagaggatggcttcatctggcatcagtgggaggggaggcccttggtcctgtggaggctttgatgccccagtgtagggtgatgctagagcagtgtgaatctggagtgggtggaggcagagagggggatggaatgggtgggtgtg

SEQ ID NO: 2085 - DNA, 465 bp, Homo sapiens
  misc_feature (1)...(465): n = A,T,C or G
gtccggctcctggtggtcccatctctctgctcaggtacatggaatgccacgcacctgcttgcngctcacactcatatgcacacactgcttacgcaccggattccccctccaacgccgccctcacatgtgcacaagcccggcagatttccttttgtgctcattttgcgggcctctggttctcctctcccgtggccacatttcctccttggtccccctggcctgcctccttcctcttctgcccctctgtnctggntgtgccctgggagagaagaggcagccgcggaggngtgaccaacgcatcccacgagggttgagttatggaagaaggctgggactgcanggctggcctccggcctgcgccctgtttgttttcccttagccccctgaatgctagattaagatgtaaagattaccccggccgaataaagccgggagtcaacactcaagcaaacaaaagtgcttgca

SEQ ID NO: 2086 - DNA, 464 bp, Homo sapiens
  misc_feature (1)...(464): n = A,T,C or G
gactgaggaagacacaggcagtatgccctgccttgctgaccggnctcattaaatcaccatgaanacagcaaaggtgactgattgcatggggagcctattccacacctctccctggatagccaagggccagtctgacccaacatgggggaactagcctggcctagtgtgaaactcaagaaagggggaaaaagtgtaaaatgtcaaataagaggaagttgtgtccatgtcacgctaaggccaagagggagctggagttgaaactccactcctctgtcccctgttgtctgcctagcaaagggctttgctctatactgagcagcacagaaaacaaggtatggggaaggaatgagtgtgctttgctttgtgagacttgatctatgtataccagagatccatctacctcagcctcttgagtgctgggattaaaggcaagtgcccctaccactaccatccaaaaaaaaaaa

SEQ ID NO: 2087 - DNA, 463 bp, Homo sapiens
  misc_feature (1)...(463): n = A,T,C or G
gactgaggtggggtctttccgtctagcaaacactgcaggcggngtttgaagatggcccagaactctggtgncgctgtccgccggcgatcaagccaacaggatggcccaccgatcctcccaaggagatctcaacccgtcggccatggcttgggcaatggtctccggagatagcttcctggttacctaggctggatccgaatcagccgggacctcggccaccagcgcgacccagcgttcgggccgacagacgtcgagtccctgtcggtggccgcagccggagccgaagccgccaaggcagattctcgccttacccgatcccaggcgtcaagctcgacctcttaagaagtgtgctgcagcagcgtctggttgcactgggaactgctctcgcaacccgaatctcagcgtagaacgaatgcctcccctcacttagcttacaaacaaggcctttccaaaaatcaaaaaa

SEQ ID NO: 2088 - DNA, 462 bp, Homo sapiens
  misc_feature (1)...(462): n = A,T,C or G
actgagagacactactgatgagcaagcacatgcaaaggcagtgaacaagaagatgacagatgcttagaaatgccactgggagctgantgctgtttaccatgaacatcacaaaccctcgactccgacttccggttccacaagttcttcctctggatttcatttaccaaatctcctggagaccctgtacagcaacntggatagggagtagccaggtcctactgactggctaaggacatgacattggaacccggagagtatgtgtcagatnatacnggtcaagtccaactatttactatctgagtgcctangagattcctctctttggcgtcctggaacttgctgtgtaaatcaagctgccctgagctcgcaaagttggcttctgcctcttgagtgctggtattaanaggcatgcacaccacacccagaacctccctttttcataataaaaattatagaatacaa

SEQ ID NO: 2089 - DNA, 462 bp, Homo sapiens
  misc_feature (1)...(462): n = A,T,C or G
acgcagtgcagaaaaaggancttggccatgtcaatggactggtggacaagtctagcaaacggactacatcccccagcagtgacacttgacttgttggacagaccagctagcaaaactgaactcaaggccattgcccatgcccggatcctggaaaggagagccagccggcctggcacccccacatccaacgccagcacagagacccccacctctgagcataatgacgtcgatgaggacatcgttgacgtggacgaggagccagtcgcagcagagccggactatgtgcagccccagctgcggcggccttttgagctgctgattgctgctgccatggagcggaaccctacccagtttcagttgcccaacgaactgacctgtaccactgcactaccaggttagcgacatcatcatcataaccctctcttaccctggcttcccaagggattactactgcccgtagcc

SEQ ID NO: 2090 - DNA, 460 bp, Homo sapiens
  misc_feature (1)...(460): n = A,T,C or G
gactgagctttgcagctccctggggatggaggtgttgtgcccactgaggagtttgaaattcgatggtactgactgagaaggttgggctgaatcatctgatgcctaaagctgactcaggagcagcactgctccttcacctcagcgacgcaaggtgtttagaatcccagagttatcagatcacagaggcttccacaccaatttcaaagaaagcccaagaggacaggatttgtgtggcagggtcaagatgcctgcaggtctccctgagaagatagtgcataaagctgtgaaggtgaaacctaagcatccacagagactccaggaagggaaagactccagaagtatagaatatctatctgcagagntgangggactattnnaaanattcnggnccctcngagatncngtgcctattaaagaggatacatgcgccctggatgcttcccttgaaggttattcctgg

SEQ ID NO: 2091 - DNA, 459 bp, Homo sapiens
  misc_feature (1)...(459): n = A,T,C or G
gaaggccattctatgagggaggccttggatttgnnaaggnctgggtctctctgcatnaaggaagannaccgccgncaggggagctgccaccggagacaagcactcacagganctgagaggagctggatggcaganaggcgtttgtggtgatttatangagccaagggcntgtggagagggatgtggatgctatcagctcggtggattaaatgcccatttacattgttattgatatataaattatccgtaccaagcagacagtgaggaaaaggattccttgggcaggaatggggcacacaccccaggatatggactcttctttgcccaaatatatccatggggctcgtgtaaagtgagttgctaccctgaagttgaaaccctgggcctcatcctcaacatgtcagcgacagcctccttcattcccaaggcatccgtggctagccaggttcgaagaagaaa

SEQ ID NO: 2092 - DNA, 459 bp, Homo sapiens
  misc_feature (1)...(459): n = A,T,C or G
cgaaacaggaggatcgtctgngttnngtgaccagctaagttccaggccagccagagctacatgaagaaatcctgtctgaaaagcaagcnaaanaaggangaanagattnttgnctcngttctncaatgtngatgattactacngtcnttgtgtggatgaaaaaaagccagctcanagantgcctggctngttntngatnaacttgacacnagctanagtcacttgnanggnnggaatntnanttgcaagaaagccactttaaaaatccagctgtaagacatttccttaattagnggctgacatgggaggactgagcccattgtgagtggtgntatccctggactggnggtcctgggttctataacanggtagcntgancgagccatanagagnaagctcttgcctccaggntcctgccctgtttgagtttntgccctgacttcttttgatgatgaacag

SEQ ID NO: 2093 - DNA, 458 bp, Homo sapiens
  misc_feature (1)...(458): n = A,T,C or G
cagactgaggagggtatccgncgagctgtcgtctgaaccccgaggtcataattcacctacatgacatgctgccaccctttgctgatgtctcaacccagctacttcaaccttccaatatggatgtccggaaatcctccaggccttcatgaccagcctgggaatgctgagtctgcaagcatccatgagacctggcagccaccaggttctcaaccaccactgggctacacagatcatcttatnnngtaccttnccaagacnccnacttacnnggannnagnnnntnctggnggactttcctggnactngagggaccnagctatncgcgttacacaagacatgctcntggactgaacaactgancaacngnnngaacnttggcctctntatcaggagacaacccttggtggctgactcagaccatagcctgtattagtaantctttctcatatcttatgaca

SEQ ID NO: 2094 - DNA, 457 bp, Homo sapiens
  misc_feature (1)...(457): n = A,T,C or G
gactgagcttgccagcaccttccgatcctacaagaagtagtccttgggaaagaggctcccaggacaaaggctgnggcttgtcttgctgtggatgtacttctatggagacancacagggctgtgacaggatacttctgctcttccaccaagcagcaagtgcctggtgagggagaatggtcctagccaggccctcataancaggggacaaccttctcttgaccagatgccagcaggatgatcttccttggacaccagcaanagggccaggacctgggncatancatgcnccntgaacacagtgtttctgaaatgaagatgacanccttgtgattggcctgggngctccccatggtttntncctgncagntccaccatccnactcacccngaactcttccttatgcccccacacccattnttaccacattnggattggcccttgcttccaaaaaaaaaaa

SEQ ID NO: 2095 - DNA, 456 bp, Homo sapiens
  misc_feature (1)...(456): n = A,T,C or G
gcttcaggaagtccctgnngctgnccagattcactaggcccctncctatgagaataagcanctacagactgagagtccacctcagatgctgagcctgcncagaagactgaggcngctgngcngccnggactcangcncgctgngcttcnnnngangatntctcagaggaganaacccgcgaagacaacntngnccngntcngctntccnggangaggtttngccntggaaaccntgaggcaccctggaaacggacacntnttcaaccntgtggagcntgccntgatgacntgtgcaatgcgcnttcagggtttcccacctgtgtgagctgtcacccntgctggagtgggctttcgtaatatagctgtctttgagttatttctgttcttgtaactaacccctcatccatacttctgtaggtaatccaaatgaactcaattgttcaccaaaaaaaaaa

SEQ ID NO: 2096 - DNA, 455 bp, Homo sapiens
  misc_feature (1)...(455): n = A,T,C or G
cctgatcgaccctgaaggccgtgngctngtgncccatcgcagcgcntgatcanacnaagtaatgcaccgagtgtanggagnnaagtgnagtctcgcacccttncngcgnacactngaggtgtgcatatgatgactgnatatgaanntgcttgccattnagganccnngaaacangtcntgnganacncaataggnaaccacacctgaagctctggctactgnannaaaaccnngagaagaggacngtgagggtcnatagnnagaccactcttgaacaatgacccanggacgtgagaacatctgcatgcacttttgtctgaggactccatccnanactcactctgtctatgtnaggaggagctctcanggtgccgnacagagcctacggaccaacgagnatcaaccccctgacttcncacaaactcatgtgtncaagggtctggtggaatccctaa

SEQ ID NO: 2097 - DNA, 454 bp, Homo sapiens
  misc_feature (1)...(454): n = A,T,C or G
ttgatccatgaggagaacatggagangaactggggaacaggatncnagntgctcaaggntggntacgtggggactccagntacccacanaggccataaganagagctgnattgtctggnacgtggagttaaaggtggcctgtncccaatgtggatgcctaggaactgaacctggnttctgcaagancaaattcttttaacttctgagccatctttccagctccagttctcccttattaaaaacaagagagcttgctcctcttttgctcttgctcttcccttcttgctcccgccctctccccattcctttctcccagcccccttccatgtactcatggctggtctctacttctctctcttttctctctctctttctctctctccgcctttctctgcctcttaactctcttccccatgccctgaataaactccattctatactaaaaaacaaaaca

SEQ ID NO: 2098 - DNA, 453 bp, Homo sapiens
  misc_feature (1)...(453): n = A,T,C or G
agactgaggtctagtcttccttgagggagttagggcagaagaagaagaagaagaagaagaagaagaagaagaagaagaagaagaagaagaagaagaagaagcngangncnnngaagatactntgagaggntgcctgtttatttgntcgtcgtactgattattatttagcttgctttcttatggcncccgcggccttcttcccagangagntcctctccangntgggttgccccctccctcntttgtcctacagcnaactgctggngaggtggatcagtggttaacagcccnggctgctcttctggatactcctgngttctnttcccancatcgttgtggtggttcaccacccctncataacgagatnctgntgccctctttctgggggngnctggcggctgcctncngtgttctttcttattatagatgaattnttcttttttttttttaaag

SEQ ID NO: 2099 - DNA, 451 bp, Homo sapiens
  misc_feature (1)...(451): n = A,T,C or G
gactgagcctgggctgctgcttctangcaaaggaaaaacagaaatgcggagtgaaaaactacggaagtcatgttctagcagccagacacaatgggaagactgtngtgcaaatgacaactgtaggctcgttggcagatctgtcccaggaccacagcaggggaggaggatggcctggtgccccttaatggaacacacacagaactgactggagacgtttccctgcatttgtctagcatatacgaacacgagcacagagaaagactgcatttggaaacttagagaatcatatctagaactagtgtgttaaggaaacaccacggagaccttgccatgacttgcttgnttgtgcctagtctcattcagnttctttctaatttttgttgttgttgatgncatttggtctttccagacaaggtctctgtgtatcttggctggcctggaactcataaag

SEQ ID NO: 2100 - DNA, 450 bp, Homo sapiens
  misc_feature (1)...(450): n = A,T,C or G
accatttttattactagnaggaaaagattctttatcagncaatnacagttcnnaaccttttccttctgtttcagaggaaaaaaaacccaggaacaaaatnanttncatattctctggcacagaaaaagctgacaggncttctgaccgctgancttcctgcttcaaaattccnggcacnaagaactgngccctactctttntatactgnnnantgaggatcggagcctccacnggtgtgaaccattagagaacangccanaactnaattattgcagtgntatttaagggtacctgnttataatggntaatntcagttgtcagctttatntatgtntaancangatgggancacctgcctactgngggtggcncatttgctcgctgcnggcctggactgccaagtgggaagggagctgngtgaanggaggaagcntccattcttcccaggct

SEQ ID NO: 2101 - DNA, 449 bp, Homo sapiens
  misc_feature (1)...(449): n = A,T,C or G
cccgcagagtgagctgcntggctggnaaatncaccgaagaatatnatnnttgctcttgactgnacgctgggggatngnctccagccagactgancagttggtcatgaacactacgnctntngaagcagaagncttctaaatgggacagcgctctagcattgtcagttcttgaattccctccagtgtacaccttacnaaantagtcacngccctgangctcttntntnttccgacccancnatganttnagcccaggaacnctatngaagtgctgcaaatactgtgaactgtgctaccntgccaccaaacantacatttcntatntacanaaagtcnntaaacattattttanaattatanacaggtctggaaatagttacntattgacgcangaaaccagtgcaggatagagaatgagaggaagtgttgaagnctgaatgattttcaat

SEQ ID NO: 2102 - DNA, 448 bp, Homo sapiens
gtggggtctttcaagagaagcggtatggcaccagaggcgctgaggggctcgggataaagggtgaagccgtcagtgctcctggaaacgaagctgccccaaatttctgagtcaccgtggaaagaggactgcaccaccatcttgaaactgggcaaaccgaagcaagaaacgcctgccatattgaatctttgccagctttgtgttaaagggaacgagcgagggcctagaggagggggtctagtgtggacggaaggaagtgtccatatgctttataggcatatgaagccatactaactgccacgtcgggacgggagcagacgttgaatacgaacgagggacgtcatgccgcttgcgtgtgagcatgggcatgcagtcatgccgcttgcctacgcttgtgtgagcatgggcatgcggtcatagttgttgcgggcaattcgaaacagtagcaaaa

SEQ ID NO: 2103 - DNA, 447 bp, Homo sapiens
  misc_feature (1)...(447): n = A,T,C or G
gactgagttcccgaggagactttccgaatggatgccactttaacagctccgtctgggagntgtgaaganctgatgggagggaagccctctcgggaaagcaactcgccatcaaccagacatgtccgaaggcagggaattcagccaggagctctcctcccgccacgaagacattggagtcatgggacctctcagcagccctgtccgtcctgatccagcggtaatgggaacacgcctggagctgtcctgtgattcattgcccccctccattactgctctgagcccattcatgtcagcaccatctgtctaaaatcactacccaggaatgctttttaacgtcatgatcacatctagatgaggtcactctgccagcctgaggctttaggtctgcagaggaaggaagccttttctctgcagaaaataaaaaggaccatgtgcaataaaaaaaaa

SEQ ID NO: 2104 - DNA, 444 bp, Homo sapiens
  misc_feature (1)...(444): n = A,T,C or G
ctgggtactagcctggactgaggccatgcttgctcattggggaactctnanggtagggcnggaagcgtganatnnctccctntcaacgatgaatgatnatgccnnacccaggacccacgtccacctctttgaagatggctgcangagccctanngtaccaccctngaccaggngccacattgcttggttacacctaagacgntatngcatnttttattccctaagcactntgantgtganataaannagatttctcnggntntccacaanctaantgagnaggctgaacctgancttcctgangagancctgactaaccaacagcctggacngagtgatgacaatgcgactagagcctggtgtantggggggatgggctntnccctatttaaggntcagactcaaaagagtaaactttggcccttgatctgtaaaataaaaaaa

SEQ ID NO: 2105 - DNA, 442 bp, Homo sapiens
  misc_feature (1)...(442): n = A,T,C or G
taatgataataaccctgtcctgccctcactgcagtggccactggnagngtaaaatcatacatnacagagctcaagagcntcaacaagcccatnanngnggatnttggcacagcctcagcntgtatgatgtcgtatttgagganctgagaccctggaggataagnntgtgctgnnccctgaaatagngacaccttcnttgaagcttgacctaccctaangacactttaanttgtctttggagtgataaacaccctntcnctanaggcaaaagctnagatggnccanaggnagcgagtactatctgagnccatggatttgagggtgcnttccatgagncctanngaggcctgcaaagcattttntcccaccanacgcttgncacngactatcngacgaggnccaataaactttcnaagggggtnctcntaaggaatgaagcccc

SEQ ID NO: 2106 - DNA, 441 bp, Homo sapiens
  misc_feature (1)...(441): n = A,T,C or G
cctgcattaagtcagactgaggtgacctggaagtgtctatgagcttcagaaccttctgcctccactgtctaaatgctggggctagaggaatacaatttatgcagtggggaagatgaacccaaggcttcatgtgtgctagtcaggactcgttcttgagaagagcagcntttggaagagacagccaaaaagtgatacagggcacgaagagcgggatacgtctgatgaggacattgacagtnatncacacncaagggaaagaggtgatggctgacagtaggtgggaaggcaagtgcctnagtantaaagagccaggcagactcacagncaaattctgtctgnatacgatggacgtaatttgtttgagtntttgttactagtnactaagcctaacaagggcntgggagaaaatgatcataataaaattcctaccttgggaccctg

SEQ ID NO: 2107 - DNA, 438 bp, Homo sapiens
  misc_feature (1)...(438): n = A,T,C or G
tcctggtcccctgtccagcanngggangagaacgctgtggnntactgtaagttcacccttgccacctaaattctgcacctcctggtttgaaaattccttctacaatggacagaacagatttgntatntatagattatncactatcaaanccaaatagntcatcaactgatttggaaattaaagattgtgntccgntaattttaaattcagatgaatgctatcagagttttgcanancccccttcttcancaattacttcttgtgaaaattnngcaacaccatctcctccgnaagttactgcgattccagaagacattctccagatgataacaagagcacaggtcanacctagcttctcccttggatgttaangngatgccacgnaggatgggcaccngaagngctgccaacaaggaaaactgggaacgggaattctac

SEQ ID NO: 2108 - DNA, 433 bp, Homo sapiens
  misc_feature (1)...(433): n = A,T,C or G
gactgaggacatgtccagtgaggaggaggcagcggcagaggcagcaggtgacacccacctgcttggcttctccgatgagatcctcctacacatcctgagccatgtccccagcacggacctggttctcagtgtgcggcgcacctgcaggaaactggcagccctgtgcctggacaagagcctggtgcacaccgtgcttgctgcagaaggactaccagggacnnnnannagatngcantaccatatgctgngacatgtnnngncctgttgnngagtgttggnanatagctacngcnnncnnnctnatnaaanntgaagagntacanacgtgnnnctttttnctggaccagagantattcggnggaaatngggtcccctcccccttncttnataactggngtgacaacantaaaatttgagccttgatgagaaagaa

SEQ ID NO: 2109 - DNA, 433 bp, Homo sapiens
  misc_feature (1)...(433): n = A,T,C or G
gacgtctggggagctcctgcattaagtcagactgaggtcctcagccctccctgtcaccagcccagcagcacttatagtcgcccgtgcccagcgccccggaggccctggcaggaggccccacccaagctgccccgggagtgctgtgtggaggaggaggagtgggcccagggagatcngnngcccagctgnggaggatggcnggacaanctnaacgcgcagtacgagccggcggaaacaanaagagcagcatctacaccgaccctcaccctggagggncatgtacantctcttcatgggactcctccccttacccnnggatcctggagccccanaaatggagcccaactantgtgcctacacccgcccgggggacgtnggagacttngggggcaggaccccctncgtcttctgacancctggccagcgcggggga

SEQ ID NO: 2110 - DNA, 432 bp, Homo sapiens
gactgagatgaaggaggcaaaagctagcaatgaaggctgccagagaagcccctacgggtcagaagtagagacacagagctgtaatctcagtcctacggaggcagagccaaggaggactgctttgagtttgaatcccaccaaggtttcacaatgaggcttagaaaattttaaatcaaaatggccaccaggccattttgagtgtccctctgacttgagtgagacctcatctaccaggctggctcaacgccttcacccacaaagaactgtgggggctgctgtcctcacagccaaaatggcaatcccctcccttcctacttcagagtcacatacctctccagagggctatttacaatgatggtcaccaggacccagcccccacagggcctgccttctctctgaggaaaataaaggttgaattctaaagaaaaaaaa

SEQ ID NO: 2111 - DNA, 425 bp, Homo sapiens
  misc_feature (1)...(425): n = A,T,C or G
gaactgagggccctccttttttnaggcaactagaacaaagtcaccagtcctgcatggactttctggaaaccgagtcatcgagcaaagccttccttctggttcgcctacgagccagctcccttctctcacagaataatggagagcccgtgggcttaactcactcctgacaaggaaaacccgatgaaataagaacattgagcttctggggacaccagatttgcacccttagggttccgggctgctttgcaattcattgttcatctatctcctgtccctggcgtgggggaagagtcggggcttattcctctgcagagaactgaatgaagaataggcctgtggtgagagagtgacaggcagtgggtttttaaatgaaaatttatatgcaaatgtgcattaaagtgtctgttaatttttaaaaaaaaaaa

SEQ ID NO: 2112 - DNA, 423 bp, Homo sapiens
  misc_feature (1)...(423): n = A,T,C or G
gacctctggacgctgngaccaggaggatgaccacagccanggcccgactggacnncaaactgngaccctgtctcancanagaaacaccagcctgatgccantgcctggcaantacagangcccatgcctgacctgtcatctattggntggaacacagggcccccantgaaggagcctagagaacgtacccaaggagcctgaaggggtctgcagccctntaggaggaacagctatatgaactaaccagtacccccagagattgtgtctcttagctgcatatgtagcaaaggatggcttagttggccatcaatgggaggagaggcccttggtcttgtgaagattctatgccccagtataggggaatgccagggccaggaagcgggagtgggtggattggggagcaggggggagggggggaaggta

SEQ ID NO: 2113 - DNA, 422 bp, Homo sapiens
  misc_feature (1)...(422): n = A,T,C or G
ggcatgccctccagacctctggtgaagcccaagatcatcannnagaggaccaanaagntcatcagacaccagtcagaccgnnacatgaaaattaagcagagactggcagggaacccagaggcaccancaacagggtgcangaaaggntcaagggccagatcctgttgcccaacatcggntacgggagcaacnagaanaccaagcacatgctgccccagcggnttctccaagntcctggtgntgctgatgtncccagacagggnttctntgtgnagaccaggctggcctggaactnataaatgcgcctgcctctgcctcccgagtgctgggattaaagggcgtgtgccaccacgcccggccaatgagcaacaaancttantggggttganatgggctcacagtgtgncctttaatgaacccga

SEQ ID NO: 2114 - DNA, 422 bp, Homo sapiens
  misc_feature (1)...(422): n = A,T,C or G
gagcaccggctgctgaaactacacagtggggttgttggaccattccatctgtcattttgagtaatccccgttctcttccacaccgccatgccatttgcaggcccacaaacacctatgcatgccgtcctcctcagcactccatattctcttncagcaggattccagtgacctaactggncgagttgggcatctagcagctgaacttgggtctgctttttcaccatgcctggctgagaaccagagacagccaagntcaggcaaaatcacgaaaagacaaagggtggagacctgcngttcacaagggtcccagggggctagtngaactcttctggctgtctngtccaatgggcccttccttgtacacccctttccggggaattctttggnctttaaaannaaccctggcttagccaggaaagatg

SEQ ID NO: 2115 - DNA, 421 bp, Homo sapiens
  misc_feature (1)...(421): n = A,T,C or G
gactgaggagatttgaaaaccagcagcagttttcagcaagtcctggatgagtggaactaacgttgcagatggaactaaggtacacaatcanagtgacccagtaggcgagagaattcaaccttccattgctgcctttgaagagagaggaaggcaccattanncaaagaatgccattagcnttacaggagctggaaagatcagaggaatggctggatctctagaggccctggaaagactgaagccctgatgattaatgcctgcagtttantcccatgaaacccttttggacttctgttctcacaactgtataatgatacatttgtgctgttctaagttactaaatttgtgttggcttctatagcaattgcagataacaaaatatgtggaacatttaataaatttttacatttatatattctac

SEQ ID NO: 2116 - DNA, 421 bp, Homo sapiens
  misc_feature (1)...(421): n = A,T,C or G
gactgagattttaattcattgtntttatgtatatggatgtcttgnctgcatgctgtgtntggtctaccacctgtgtgcccagtgcctacagaggccagaaaatggtgttgcatctcctggaactgcttttaaaccgccgngctggtgctgggaactcaacctgagtcatctgcanngcttttaacctgctgagncatctctttgcctcctgcaactatgtttaaccaaagcanagccatggntaaactctctaaccaaaacaggctgcatctnccgagaaaccgggtcacgaatttnacattnacctttggaggntactcattcttgcagntgagacacacctccttgaacatgnttcaagagctaantgangagaacatngaaacattagcctatgcaattntgggttgtgttaaatggg

SEQ ID NO: 2117 - DNA, 421 bp, Homo sapiens
  misc_feature (1)...(421): n = A,T,C or G
tgcctgccttcccgcgcctgggacaatgaggcagggggaccagttcanggtcattcacggctccaganactccaaggatgantggatgtggcagtaactgtgtcaganatgcacaaaatcctaagtattgcagactaagatgaagttaatcgtcaatgaagcaacagaagcatcaaaaaagaactaggggaggggggagtaaagaaaagcaaaagattaagcagtgccagtcggcttcagcaacaaggcgggggctgactcgggcagcagcggacgccgagcagctgggatctctctgtgtagccctggctgtcctggaactcactctctgtagaccaggttggcctcgaactcagaaatccgcctgcctctgcttcccgagtgctgggattaaaggcgtgcgccaccaccaaaaaaaaaa

SEQ ID NO: 2118 - DNA, 419 bp, Homo sapiens
  misc_feature (1)...(419): n = A,T,C or G
gactgaggagagagctcctcctagctacactgaggagaaaagtactctcatggtngccttcagatcaagatgcagaactntnagctcctctagcatcatgtctgcctgcnngcnatgccttgcttnctgntttggnganancggactaaacctctgaaactgcacctgctttancgntngtaccttgagngnnttttaaacaacttgctggtctnaggctccncttaaagaaactngtgattgngtccttaccgttttctccaatgaagggaaggtatcanagagaggcagagagacagcnngagaagttgggagaacactgaacaaaccgaggacagagtggggtcanctcaacttancctgagttttcagcaactgaagaactttggactccatctgtnatctgccaaaaaaaaaaa

SEQ ID NO: 2119 - DNA, 419 bp, Homo sapiens
  misc_feature (1)...(419): n = A,T,C or G
gaccatcgagcagtccctgctggccacacgggtgggcagcatcgcctagctcatgcacaagaccaaaagcagncatggagcaggaaaggatttatttcagcatccacctccaggtcacggtccatcaccgagggaccaactcaggcaggagcctgganacaagagcttgaagctgcggnngtggaggggtgcntgattactggcttgtccccttcagctcatgttcagcctgctttcttatacaactcaagactacctgcctgaggatggcacttgcccacagtgggctaggccttgccacatcagtcaatcaacagtcaaggcaggtcgcccactggacgatctagtctgagaattacctgaaaaatccctcaggttgagactnccttgagttgacaataaaaactctccaggacagc

SEQ ID NO: 2120 - DNA, 419 bp, Homo sapiens
  misc_feature (1)...(419): n = A,T,C or G
actgagacaggaatctagcatggttgcccttccaggagcccaacaagcagctgaaagagtcagatgcagatacttaaactcaaccaanggacagaagctggggacccctgtgattgaatttgcgaaaggctggaagaagctgaagaggagggtgagcacataggaggaccagcaatctcaactaatctggacttccaagatctctcagacacttagccaccaactaggcaacatacaccagctgatatgaggccctaatacatacagcagaggactgcctcttttggcttctgtgaaagaagacacacctaaccctcaagggacttgaggccccaaagaatggggaagtctggtggggtgggtgggaacatccttgggagaaggaatgggatgaggaactgttggagggtggacctcca

SEQ ID NO: 2121 - DNA, 419 bp, Homo sapiens
  misc_feature (1)...(419): n = A,T,C or G
gactgaggtgcccaagccgctatcgtctttatcaaggnagccatcctcccaggatgcacttcaagggccgccggncgctgctccgttgtgaagtggaggctccggacccggtgcacagtgtactggctgctcaatggggtgcctgtccaggacacctgagcgangntttgcccagggcagcagnctgagtttcagcagattgtggaccgcctccaggattctggtgctttccagngtgngggtcgngataacgtcactggagaggaagtccgcagtactaatgcctccttnaacatcaaatggatcgaggcagntcctgtggtcctgaagcacccagnctnagaaagctganatccagccccanacccaggtcacactgcgatgccacanntntccntcgacctctgtttattacacta

SEQ ID NO: 2122 - DNA, 418 bp, Homo sapiens
  misc_feature (1)...(418): n = A,T,C or G
gactgagaaacctcaagtctttgacatcgantgtgcagcttgctttacctganctcttccggcgggccctcgtacntgttctgctctaggcgggntggtgcngttgtgntgtgctaagcataaggctaggaggattgttgcttggcaggactatcagtatcagggagtctgacctgcactaaacnctaaaagatacagcnganctganagggtagtgccatcgtcaaaggaggcagctagagaccaccaaggnacanntncatcaccanctacttgagcagngcacagntntgnccttgtntgatgggccacatccttggntgtatttgggcctggccttctggggatgaggacctaaaaagaaagngnccacttgcctctatttagagccttaaatggntgccattgccttgagtag

SEQ ID NO: 2123 - DNA, 417 bp, Homo sapiens
  misc_feature (1)...(417): n = A,T,C or G
actgagagacgtgaagtctcgggcagcatgccatgggtcgcagaggctgttcaccatcttgatctagcaagattgtttgcgcccctacaccacctctgcctgaaacagggctgtttttccttggaggcagcctgggtccagaacccatgacttcatatctcagctcacctgcttctccactcttcgagtctgcatctgagtgacccaagctaggacttggagtctccctgcagggaaagtacggcagggccacctccattccaagctcttctcggggctgcctcgacttctgaccttctacccagagctcaggctcctagagaactcaccgctggcacttccggtagcaggaggaagaggnntccttcccttntgctgcttncaccagganaccggngggaacccagcatcatggga

SEQ ID NO: 2124 - DNA, 417 bp, Homo sapiens
  misc_feature (1)...(417): n = A,T,C or G
gttggttccctagagcctacccntcctccngcctctganagcgcgcacagagaggacaaccctggaccccacagcacntcntggtgtcggttagacaatgggaggagtggaagcagcacctaacgatgacagaagcaaagagtggctcacagcacaccttccccagcaaccaacaagaggtataagaacttttcattttgatgacctggtaaactaaggaagcttgtntgataatatctggcagaatttctactccaaaaagttcatgaagaaatacctaagatcacatactttctattaaagaattatatataagctaattattacagatacaaacagaaatggaattttaatctatttttagcaattaagaagccttggcaacttacaataaatatctttattaaacaaaaaaaa

SEQ ID NO: 2125 - DNA, 416 bp, Homo sapiens
  misc_feature (1)...(416): n = A,T,C or G
gaagcccagtccgatgctngtggggcagggagtttgtgaggcaatattatnctttgctgaataaaagctcccgagtatttgcacacggtctctattggcacngaattcctgcttatgtctcatggtgggnagtggattgccaggtggaaaagcccccaggaaagcagtttaatggccaaaaatgatatacnaccacanagtgttatcctcntgaaccttcaggngaatggtcataccnaaatttcgtcaatgggggatgnctccatgcaacccttgagtngattggtngtaggtgggnacagggtaatggggccttgcttgtctnancaggtggacnagncttganagggaagtttaatgcnaacccctttggttntngcttccagnaagggatcntggtcccaaaataaattttt

SEQ ID NO: 2126 - DNA, 416 bp, Homo sapiens
  misc_feature (1)...(416): n = A,T,C or G
gactgaggtggatagtcatccaggnacagaaanggcactggtgcnnagcagtgnnacttctacnanntgtgctcanggcatccatgcccacgggggaagacctgtggctgggggacaccngaattnnaagaggtcggtcaccttaagcttactcannaggacatnctgtnatggttgcaggggagacccctcattncncccacctntntataaaangcagnccgataggccctncacatttnaagtgttacgaaagtgcttacggncattgttgttngttaatttgttttgtggtttgtttcttancactgncgctcaanaccacagtacacttggccctgggtaaaattttgacaatcataagtcatttnaaaagaacagacttattaaagaaaaatcaaacaggaaaaaaaaaa

SEQ ID NO: 2127 - DNA, 416 bp, Homo sapiens
gaactgaggttagtgttccctgcgagcctgttctcagctaaatcaggacacatccaccttcgctgtctggatgaagcagctgaaactgaacaagcacaggcaggccaccacaccgaattcccagagcgaaccagacgtgaaggagttcctgtaggatttccgtgtctccaacgttctagaacatgcaaactaatttatagtgacagaagagagatgacgggttgcctgggaacaggatggaaggacacaggatgccaggggtgcgtggggtattttcaaggagatggaaacgtttttcatctgacagtgagctactccagaggatggacttgtcaatgttcatcgaactggacactcagagtggatatctttccttgcttgtaaattatacttcagtgaagctggaaaaaaaaaaa

SEQ ID NO: 2128 - DNA, 415 bp, Homo sapiens
  misc_feature (1)...(415): n = A,T,C or G
gaagcatgggtggtttnttgnggacacaggnacacccagactgagaaccaatggctccagtctgatttaaacatgggtccgtgctcacacacctcaatacctaccctctgtgctcacaagtcctgtgtgagtaagactccaaattattctgtcttgttttactcaatggtatgctctaccttattatagagtataccatgtattgagacaagaatgccagtcattctgagaaacaaaatgcaaccattagttgtcattttaattagtgacgaatagttgngtcaatcatcaaacatgcttgtataattggatgagaagaggtgtaacacgggccaatgatgacgaggtttcgggattataagtcacggacgatgactacgtcactanaggtctgaggnccatagcaaaaaaaaaa

SEQ ID NO: 2129 - DNA, 414 bp, Homo sapiens
  misc_feature (1)...(414): n = A,T,C or G
gtcctgggaatcgaacttagctgtcaagcttggccgtttgaatcgcaagatcatccttgactgcatatccagctcatggccagcctggtggtgnacttaactacctttgnagncaagcagctnccatctgggggagtcagctgtgtccacttacaaaagattacctttagctggactttttagaccgtnnacatcccctcacggaagaccctcacctgagtatccacttggctccctataatttatngggggcaactctgccttannggcacatgggcttgcctaggaggncagggntgggggaaggagnctagagtnttcagattaagaaagactaggagagaggnctttatctaagcagctatgggaaaacccttaccctgtnggccaaaactttttttttttttttttttt

SEQ ID NO: 2130 - DNA, 414 bp, Homo sapiens
  misc_feature (1)...(414): n = A,T,C or G
gactgaggtactttatttgtgggaaaganatacggacctgaatattgcaggtgctgagatgtaagaagactgctgtagagtcgcagatgacaatctttggccttcctaatcacatgagtattgtcaatgccagccagacattgnatntgccatggatngtgntgttacagtngggtgacacgtnnngcnnangnggcnganantgntgggcagnnttactnacngntnttgacaggaatnctggtgcancaggaaacttcagtattgganactgtgccatcccnaangcgagggtgaagattccaagctggattcatttttggatatgcagntaactgaggacttggattccttaatacagaacgcttttgagaaattaaactctcctcctgatgaccaagtataaaaaaaaaa

SEQ ID NO: 2131 - DNA, 414 bp, Homo sapiens
  misc_feature (1)...(414): n = A,T,C or G
actgaggtctcggtggtctcagnggcagaaccgaangcatnttnntggagcccatccacctgtcctcggctgtanntgncaaacngatcntcatcnaaganctcangcctcggaggcatcagaacagncactgagttgntcaggcnatgcnaggngtctcgcgnggacaanntgcatggttggaagaccntgtacaaccngtgtncnnngatgaagatggatgacaggancctgttcaacaccccntgngaggtggacctgcancgggcgctgacccaggaccggcaagaagccccgtcngaatgagganggatgaggngtgccccaacgtcttcttagctcganaaaagcggtggntgtgaacaaggggcnggntcangaggctgggcntcacccacatttcttgaatggcag

SEQ ID NO: 2132 - DNA, 413 bp, Homo sapiens
  misc_feature (1)...(413): n = A,T,C or G
gaatatgaacaaagcgtcacagagactgaagcagcacacacaanacncctctgagnatatattaagctnttcagcctanagtagcccatgtatgctcttttggtcgtagntcaatttctgggagcccccagtttagtatttttatgggattcctgagtgngtaaatnantgganatcttgattcttgtgncntctctttttntcttttccctntgttagtnggttntgaccaactctgatgtaatangtgtgctttatcttaatatangatatattttctatatgatatgtgatattatatacaattacatanataaatnatatgcagtcacatanttatatacaattatgcacanntatgtatatantcacatataaaatataangtanattttatgtatgtatatcacaat

SEQ ID NO: 2133 - DNA, 413 bp, Homo sapiens
  misc_feature (1)...(413): n = A,T,C or G
acctgagccagcagtctgccgttggaccngttggcccgcttgcacgacgagctgcntctttctnncctgnnccggtgtaaagantggttctttctcgactgnttgcctggtgccaatggttgganacaatccctctgcaacctgaagcngcnaattcaaatganctcagtataaatactgaagtgtattccttaccgtcaaagaggctagtggtgcttcagttaaggtccatctttattaaggacaaatcgaagncattctgagaaaanntgctggccngggaggaaagcancggcttgtgccangatnattggactctcaagcagccattcgtatcaccgcatcagangcccngcttgngcanaactccctntccggtatctgcttacaccttgtttgcaaaagagtgttca

SEQ ID NO: 2134 - DNA, 413 bp, Homo sapiens
  misc_feature (1)...(413): n = A,T,C or G
tcctgaaactgcacgnaaccntgntaatacattggggttggccnngagacctnatnaagnncagntntcccctncactatntaggaaggtnnangncatgnangtngacacgganganagacccnangatnttgtacnnaagcnntgngtgntaanggacntggaggcagaagccagcctcccagagaagaaaggaagtaccttgtctctggacctccttattgactatnttcattatatggtgganaatcatgaggaggacgattaggccatggcccggnataagaagaattactatcantgaaaccccanaacggattccgaataaggntganggngtataagcccttttacccaatgggaatgccagggcctttatcgggtgattctttgcagaataagaagatgggggt

SEQ ID NO: 2135 - DNA, 412 bp, Homo sapiens
  misc_feature (1)...(412): n = A,T,C or G
gcagtggcagccatgagantcctctgccngcgctgaanctgacttaaggaaatgtgcngggnccantggtgttggcgcncactctagngatgcgtgnggcaggctgttcaaacgncagcctgngttccataatgacagaaaggaaagacttgcctaacacctaaggacacttgatttgaacagggaagtcgaacctcatttcaataaatacacagggagggggggtgttgccatcttaggactggtttcctaagtgtctaataactctggaaatagtctacctaacataaattcctgcatccaagggtagctcacaatcagaatattgactgcaaaagctctctggaatctttcaaagtgagcccccctgccccccaggcaagaggtctgagaaccactgtaaaaaaaaaaa

SEQ ID NO: 2136 - DNA, 411 bp, Homo sapiens
  misc_feature (1)...(411): n = A,T,C or G
cgcggggggggggcgcgcgcgngngccccggcngcggggggncggggcgccgggcnnggcccggcngcgggggccggcgggngcngcgcgggggcgcgcgccgcgncgcggggggcgggcgngngcggcgnggncggcggcggggngcgcgcggccgggcgcgcgcggcgcgccgcgccgcgncgcngccggcgggcgcncgggcgggggcggcggggggcggggngngggcggggcgcgnggcgcgcgcgnggcggcggggcggccgcgcgcgcgccgccgcgcgcgnggggcggcggcgcggcggggcgcgcgcgcgncgggccggcgngcgngngcngggggcggcgnggccgcgcgcggccggcggcnggcggcggcggnggcgcgcgcgcgccggcggcgggggcg

SEQ ID NO: 2137 - DNA, 410 bp, Homo sapiens
  misc_feature (1)...(410): n = A,T,C or G
gtttcgaagtgacctgcagtggatcctcttttgtgctgacctgccatcatgcatccaggaaggccctcagtgagnactggnggccttganggatggcngaagctcttctgtcaacacctgacanggtntntntggaaagactagngcaggnggccaaggaganaggctacaccgcacagggagaanntgntctcagnggctgacatggccaaactgncccangagactttggactgncaggctgagctcctgngaggnggnttgggtggtccnaacaganatnngagntctacagnncctnatcactggacattcantgctnattccctatgatgaggattttaaccacnagcngtgtnaaaagaaaggccataaaggcccantggacagtgagtgcaggggtcctgata

SEQ ID NO: 2138 - DNA, 408 bp, Homo sapiens
  misc_feature (1)...(408): n = A,T,C or G
gctgacattacaagagggnctggccntacccanacctctttnntagntactgacaangaaaaacgagancntnangtgagcgcanncacagcttncnaatcccagnncaggannattcctganattcacatcccagcntgccacatggtggnatcacaaccatctgnaagtgagatctgaccttcctcttctggcatgtctgaagacagcctacagtgtacttatgtataataaataaatctttgggcccgagtgancaagaactgtntnaggnggnntnnccngncctgagcngaggttcnaaaaaaatcaattctcaacaagcatatganggctcccaaccacctgntcagctacagcngtacccttatacatagnatactgaatanataaatccttttaaaaaga

SEQ ID NO: 2139 - DNA, 407 bp, Homo sapiens
gaactgagtagagtttttctctatagccctggctgtcctggaactcattgtactctctagaccaggctggcctcaaactcagaaatcctgcctgcttctgcctcccaagtgctgggattaaaggcgtgagccaccactgtcctgcccgggcccctgctaaggttttaaggaaagtatggaaagtattttacattataatacctgtatttactggccacacgccgtttctttgatctattttagagttgccagagtatcttgggaaaattgtttagcatactgtcaagatttgtgctttgaaggttattttgggggcctgtgaaacatttgcagataaatctgcttctattaaaaatctgttggttgtgtattcattaaaatcctcaaattcaagttaaaaaaaaaaa

SEQ ID NO: 2140 - DNA, 404 bp, Homo sapiens
  misc_feature (1)...(404): n = A,T,C or G
gactgaggagacttctctgtgcctgtnagcacagaggcctntgngtnccctacagggagacaccctgccangcgccacagaaatgccctttccagntccggatgcctgtggaagcttgatggtggcancgtancctgaagctggtagcctgaagaccgngggacactggagcgagtcctgcttgtttgcagtcccagtttgagcctaangaggataacagccagggnggaagantgtggcccanccctgccggaagagaccgaagagaccgtctcaccctgctnctccttaccacaggaaccaggtcatccttctggccctgaaggcaggcctttgctaccagttgctaacttcccaggtttaccccaaataatgttttatcattgntcccactaaaaaaaaaa

SEQ ID NO: 2141 - DNA, 401 bp, Homo sapiens
  misc_feature (1)...(401): n = A,T,C or G
gactgagacccacggagccgcangcgcccacacctacnctcacctgctgggaccacgngggacaatgntgaaaggntgncccctgccncgtgcaaacccagagcannttttnactctctccttgactacgactaagactccgnctctanggcatcacnggacggacacaanagtaagactgcttggatgaggngaatgnntnggaattgctccctgggactgtattccngctccttcgttgggtgcanatgaanaactactgnatgaaaatanaaggngtaaataggaaaagctggatganagaatggtttggaattgctccctgggactgtattccggctccttcgtttggtgcaaatgattaactactgtatgaaaataaaaggtgtaaataggataaa

SEQ ID NO: 2142 - DNA, 401 bp, Homo sapiens
  misc_feature (1)...(401): n = A,T,C or G
gacttgaggtgctttcagagaaccngangcagggtggngaatcacctggangcggaatcacctgnccattntgagccaccctgtgagagttcctggtgatcacnatcgctcctgactgtngaaccatctgncctagccttatactataagctgctctncccttnccnagnanatgcctggctatcgttaacnangactcgggcnggcattgttggcttttcctttgcttnggttcaaangggcaaaagatgatcngcttttcttgcaaatgacccctttgaagcccctgtgctttgaaaggctatacccctatacacactaaanagccatgacctctnggggactggtttcgggagcaattaaacagcacccagatgagctcaagatcccaaaaaaaaaaa

SEQ ID NO: 2143 - DNA, 395 bp, Homo sapiens
  misc_feature (1)...(395): n = A,T,C or G
aagcctgaccaagggactngcncaggacgtgatccatatggaanananangtgcctggtttntatggagaaagtggcaaggttagaacaaaagcatgccttggagcttntctgttgnntgaaacaaccactgttnacacttntgatcacagaagtcttcctaggagatactggcagggnggngcctgacatgccaatacataatagtatagggacctaggatgnggatgggccancaaggagntgatgncacctaggaggctganacagggcttcctgggatggtggcatttggacttnttaaggacataagtgtntnttcccagatgactggnaaaaggctttgcttaaataatgtttattcctttcccaaatattaaaaatcaaataaaaatt

SEQ ID NO: 2144 - DNA, 394 bp, Homo sapiens
  misc_feature (1)...(394): n = A,T,C or G
caccacgtttcaaagccctgcantttccaacagctccgngcgagcgacagacacacttgggcctcaccgcagcttctgtgaaaggcagacatgatttcatctaatgaatggatggtaacaaaatgagctccaggaagcctgcctgcctactctctccccgaaccacacccagagaaatggaagcctncaacagaaaagggctgggcaggtcccaacaccaccctcaaatggaaagaacggagaaaagaaagggacggaaggacacccccctcaacagcttcccgtctgcacgagggaacactagaaggtgcagtgggaacgccttagacctctgatctgctaacaggcccgatggcctcactctaaccatccattaactaaggatgtgcaccat

SEQ ID NO: 2145 - DNA, 392 bp, Homo sapiens
  misc_feature (1)...(392): n = A,T,C or G
ctggtgctgggggcggcaccctngggccgcacgccatnatgacttcttgggggngctntcngaggaccggacaggaagnntgggtggntggatatntgcggacgaanaggcncgggccgcgcgcngtgacgcngctggncanctgcangccgcccacncgctgacgtcncgncnccgnangctntactnactnggntgccggacaccnnagnacaagangctttgtanccatccccacagagacnnacagacggactccacaaggnnncgcgtgtcgccgaggccgccaggacggagcgattctcacggaggaaggagcacgccaacagggcctgactgcgtacagacatgtccccctcaataaaattgcagttgaaatggaaaaaaaaaaa

SEQ ID NO: 2146 - DNA, 391 bp, Homo sapiens
  misc_feature (1)...(391): n = A,T,C or G
cccccctaatcactccctaagctnccatttcagaatgatccagaaaagcacntgacgagcagggctacattgaataagcaacatgataaaagccaataaggacttttaattttcatgaaaagttaaaaaatcaaagtntacagaaagattcagctacacttgggcctggagaggtgggtcagtggtgaagagcacctgatggctcttccataggacccaggttcagttcccagcacccatatggtaggtaacaatggtctgtgagtccagttccagaggcccaatgccttcttctggacctcttaggtaccaggcatatgtgtggtacacagacatacatgcaagcaaaatacccatacacataaaattaanataaatatgacttttagag

SEQ ID NO: 2147 - DNA, 390 bp, Homo sapiens
  misc_feature (1)...(390): n = A,T,C or G
ctcatactcacttccnagcactgtgcacaccggtagtncctntnnatncaacgnctttctatnctgnttggcagaacgtgggaaaccctcggctattacgccgtacgtgggggcgtngngaccttntaactgacnngaatctacnatncctagtggcacaggcgaaacnccannggacgtgnatatgagcctacccgtcctcanctcncttggngactcaatgcccagggncttcaancctgcgaggactaggaaatgnnaagtntcnncctacangngcngcccctncnnattaccctntctcttcggtcccaangaggcagtgtacataagtgaaaggactcggcttataagatcccacccatttggcgagcaaaattaaagtcacga

SEQ ID NO: 2148 - DNA, 389 bp, Homo sapiens
ccaaaccctggtaatattaatgatactctgtcatgcttacgcaccagagcctaacctaactttcctcttagagcctccagacatcagctatccaaatctgaagttgagactgaccccccaaacattggaggaagctccaaaagtcttgtggaggatttgtaggagagattggggaacccagaggggataaaaacttcacaagtagagcaagagagtcaactgacctggacccttgggtgttctcagagactgaaccaccaatcaaaatgcattcatggctggtactacactcccctcccacacacaagcagcttggtattcagacaccatacccaagaaatggagcaggaagagtcccagactatgttgcctgcctgtggatactattc

SEQ ID NO: 2149 - DNA, 388 bp, Homo sapiens
  misc_feature (1)...(388): n = A,T,C or G
ggggtctttaccactaccccncangancagccacagtgaactggancngctctnatccagncctgccctgngtcacggcctcctggnctggcctcacagnctcctcgggtnggatctncaggccctacaggnncgnatggnaactgangcctatttcctccnancgctgggttnataagaaatgaaactccgcagcgggccccagtggcagnccacacggacacacgcacactcccgcgggcgggggaggggcgatgagntccggancggntntgacaccaccaccgggcgncctgggngacttnagcctgttgggncccagggnanaaccttgagctttcccagtcagcngctgcatcccactcgcctcgttttggatttaaaataa

SEQ ID NO: 2150 - DNA, 387 bp, Homo sapiens
  misc_feature (1)...(387): n = A,T,C or G
gactgagggaggagatgtantatgccctcncccngcgctgaancctgcttgctntggagtggagcntnntgnnnattngancnaccacgccnacatggtggaacctgaggagccacacactgtgcacctttntactggaccatgagantataccngntgggaacngggccccctccccnnttccttcataacgngtgtnanccnaatnaaattnganccttgnnnagcaaaacaaaaaccagataagaaacttggaagggggactangttgaanagagtaagtgggtcatagagaatgggaagagaacaagagagggtagtggggaatgattgtgttcaaatacattatatatgtataaaaatgatatatgaaaccctattgaaatg

SEQ ID NO: 2151 - DNA, 386 bp, Homo sapiens
  misc_feature (1)...(386): n = A,T,C or G
gactgagcattctcccttttgaagtttgtggagcatccagatctgggacgaccaggaacgcgttctgcggttgaggacagtcacccgagaaaatctactatctgaagctccatcccgaccaccctgagactgtcttccacttttggatccgcctggttcaaattctgcataagggtctgtccatcaccaccaaggaccctaccatncttgtcactcactgcctggtacccaagagcctttgcagcccaggtggaaagactgagttagtgcagaagaaatcgaaaggcctccagcccagtgagagcctcacacatctgatggcccagggggagagcgagaccctctcccagatcttttccgacttgcatcagcagaaacagtacagg

SEQ ID NO: 2152 - DNA, 385 bp, Homo sapiens
  misc_feature (1)...(385): n = A,T,C or G
ctctctctcactctggatgacaacgtgcgancatgcnganattacctagtcagagtnnacantaaaagctgagagtccctcacagngtngaaacctgagcatgcntgagatgacgtcacaanagaaaggnttcaaagccnagttttgagaccagagcnnngtgcccanaagaagcagataccaggccaattgccttggaagaggtaaacctctttataantgaggctcctcgaaaggacactttccancctgttgnnctgcctgcagnnntgggttttgngttcaaggttntnanttttngnaactntnacccaggtnggggggnaatttgctgttgcaaccntttttgggtnatttntgntcctgnaagaaaccccttgcccat

SEQ ID NO: 2153 - DNA, 384 bp, Homo sapiens
  misc_feature (1)...(384): n = A,T,C or G
gactgagggtaagcaagctcagnttctcagtgtcactcaggacgagacaagctgcaaaagaagactctgagaccagcctagatgcctggaggaaggttagaccaactgaggcacctgaaaaggacactctccaacctgttgacccacctgcagactgtgtggcatgcatccagcttcctancttttatgagtgtttatccatgctgggatgggcactnggtgatacatcgnggcttngagncatttcttctccantgaganntcannangctaanntgccantnctgataacatgncctgtcactcggccatcntggactctaacccttnnaaactgtgagccccaaaaataaacactttccttttttaagttaaaaaaaaaaa

SEQ ID NO: 2154 - DNA, 381 bp, Homo sapiens
atctttccaaagtgaagctgatgcggtttgatgatcctctgttggggcctcggcgagttccggtcctggggagagagcacagtgagaagacactcatttccgagaacgccgttttccacgtggacctggtgagcaagaaagtccacctcaccgagaacgggctgcgcaccggacatcggcgacaccatggtctacctggttcactgagctcatgcaaattggagagtcgggatggttttcggatacttctgctccgagaatctcaagctggctctaactagacttcatttctaactgctgagttctgtatgtagtcagaattatcccaattcttctttgatttctaatctaataaacttgcatttttttcaaaaaaaaaaa

SEQ ID NO: 2155 - DNA, 380 bp, Homo sapiens
  misc_feature (1)...(380): n = A,T,C or G
tgatagaatagatggggcatcnttnantcctctgacctctacnnggncttttngcatgttggagcttccgngcctggcatacctacacntgcatacntgnctctacgtatnatanttaaanaataganatangttaanatgttttaaactgcatactnnngcgcaanatatnagtaatttaagnncctagnccaacctctggatcgaanacttggcgcntggcacngacttgatctaagtaggagtcagttgacttcaggngatctccaagccgtctnggntctcttctntgatantgactgagantgagaaggngntatcatttgggcgtngtggatgaactgaaaggaaaattagatggagctttctgtatttcttat

SEQ ID NO: 2156 - DNA, 379 bp, Homo sapiens
  misc_feature (1)...(379): n = A,T,C or G
gactgagacaggggccaagcatagctgttctctgagaggctctacgagaagctgactgacacagatgcagagaattacagccaaccattggactgaggttggacacccctatggaagagttggatgaaggattgaaagaactgaaggtgatggcaactaccataggaaaaccaacagtgccaactaacctggacccatgggagcaaccaangaacatacatggactggcccatggcccctggcatatatgtagcagagaactgctttgtctagcctcaatgggagaggatgaacctaatcctatggagacttgatgcccaagggaagggggataacccagggatggggcagtaaagtgaggtgaggtggggatgggtgg

SEQ ID NO: 2157 - DNA, 379 bp, Homo sapiens
  misc_feature (1)...(379): n = A,T,C or G
aaggctggattactcgacactgactgctcattcgggaagacntgggattccgttcctagcacatgnatgcatgcatacntacatncatacatacatacatacaacnaatngtanangatgcaagatnatcgcagccanncatnanactgtgcacatgagaccccaatggacngagttaggagggactgaaggagctgaggggatttatctgacatcnntaggaggggaggccgttggncctgtgagggcttgatgccctagtgtagatgaatgctagggcagngaggggggagtgggtggntaggggagcaccctnatagaagcagggtaaggggggatagnataggaggnttacagagggggaaaacgggaaagggat

SEQ ID NO: 2158 - DNA, 379 bp, Homo sapiens
  misc_feature (1)...(379): n = A,T,C or G
atgttgccacagtaccctctgccannanccatnncagancactccagtgacagatcaatcnncangaaatggagatgccatangatgantttgacttctgtgaaaccctgacagntcaacgttnntgaggantancaaacatcaccttggttactacatggaacattgcgtgagncctagtaatactgatggccccaaggacctgcaagggtttggctctaagactcccctccaaaatccttcgangtatganacccttatataaaacgatntgggaagctggcnagctgtcgtaaacaaatcccacacatttgtatnctttaaatagnctctggatatcttaaggtatctaatacactatgagaactataaaagaaat

SEQ ID NO: 2159 - DNA, 379 bp, Homo sapiens
  misc_feature (1)...(379): n = A,T,C or G
ttacattcttgagaanctctcnncggtcggaccggctgcctggccnggtnnccactgnagnccngnantctgtccacnggangaagantgtctgtgagcacagtctncatgttnactgtcatcatgccgnccctgatatcatggaggaaatgaatggtcatttaagaatcctcattggctaaagagctggnggtttaaangaatgaatctaatgcaaactgtgaagggctggncctggnattaagaagatggacgattctgtgaagggaatgtgctaagacttgntngttgaaaatggaattattaatggcttgtcagtaaagttaanaatgccttaaatcattcctctnttactctatnnatagaagaaataaaacag

SEQ ID NO: 2160 - DNA, 379 bp, Homo sapiens
  misc_feature (1)...(379): n = A,T,C or G
atgttctcaggtaactcanggaaaaactcccagtagcggtcaaggtcctgaaggaaggntttgaaactctcctgtgctgtgccctcctgaggctgcctgcagcagggatggcaggtacttcagctctacttctgcggtacanaccctggctgtgcagcctgcagccngaacnctggtccntnaatggcnannaacctgggaaccccccnttgccttggggtctccnnnacccttnngccttctcccnnggcctgctggccccctgtagggacntttgtctactcccctttgtgannnacctcatggccacaganccactggacacctgttcttcactgtataataaaganttggatagcaatnccctgaaaaaaaaaaa

SEQ ID NO: 2161 - DNA, 378 bp, Homo sapiens
  misc_feature (1)...(378): n = A,T,C or G
tccagattcaagcagatgtgcatgnncctccaaggcaaggcntgcggttntgatggccaagaacacacatggngcagcnaggccatcagggggcaccctgaagaacancccagctctggagaaactgcngcttcacatccgngggaacngcggncttcaggttcaccaaggaggacctcacaggagattaggaacattctgctggncagtaaggggccagnccgctgnacangctgntnccatcgccccatncgaggncactggtccctgctcagaacantggtctgggggcctggngaanacctttttngggccccanctaaaggctgnagaggcacnnttggaaaatcnngaggtgataaaaaacccggtgacagg

SEQ ID NO: 2162 - DNA, 377 bp, Homo sapiens
gactgaggttcggagcatccactcaaatcctggggcttgacagcaagtgcccttagcatctgagtcacctccctggccctaaatcatgaatttctacaaaagtactttaagggggaaaaaaatcaaaggctgtagagcaaagcctgtgacatccgagagatgagcctgcaaaaggcaagccaagcagggatgtgagcaacttggatcccaacatgcagaagatgacatgggcagaagatgacgcagggagaagatgatgcaagcagatgatgcgggaaagccatcggaagaagccagaaagccaagaggggatacacaggctccccctcccaaaaacacatgaataaataaaaatatcacaaacgcaaaaaaaaaaa

SEQ ID NO: 2163 - DNA, 377 bp, Homo sapiens
  misc_feature (1)...(377): n = A,T,C or G
gttcccctttttgtcanngggggcctntctgtacagctcctccacctcctcgtctgtgangcggtcgcccntggnggtcagcagcctccctcagcaaactctgatgacaaattcccaatgcatcagtgtccaccccaaacagctgcctccacaggagcactgaagactgaggcttcacaagctgcagcagcccttaagccaagcagcacagcaccctgacaaattcttcctccaccaccaaaggccacattaacacactgcaggcagtttctcacactacattatgccatcttagcacacatagaaaagcaaaatattttaatggttttaaataatttaactctaggtaaataaatcagatacttaaaacaaaaaaa

SEQ ID NO: 2164 - DNA, 375 bp, Homo sapiens
  misc_feature (1)...(375): n = A,T,C or G
tccacctgacgacggccgggcgnnccgcngcgcccccccccgnccggcgtcncgncattgcggcncnaccacngnacncggagcanntgnngantcagnacgagagcaccanctctttncntnacgnctgntngcntanagggaccttttttatcggncaanggnaacaagaacaatggtaacactggntgacgtgactcttacttangctgggcctggtaatgattgatttcttatacccatgttgtcctcagcttcctgatatgatttattaagaattgctgatgaatagatatacattctgaggatttaaggtanatatgactgatttttatataaatctttanatttgagattcttttaagattcttatca

SEQ ID NO: 2165 - DNA, 373 bp, Homo sapiens
  misc_feature (1)...(373): n = A,T,C or G
gactgagagcaccctccaagccccgatgccancagtagccaccctgtcccctgctccccagcccaggggcagtcacaggaagagcaatggaatcttggctggncaggctctggctgtgtntgatgctgctcctgcctctccctcagcccatgccaggatcaggagctgtttggaccttctcatcagcgtgccatcaagaggagggccaggtccctgaaggcctctggggaccttgnggtcaangggcttcctgcgtcccanccctntgggggtggggggtgcagcgncagtgagccccaacatgtgaactgcacccagtncctanccctagctccccnacccccaagacttncagaagcccgaccggccctgg

SEQ ID NO: 2166 - DNA, 373 bp, Homo sapiens
  misc_feature (1)...(373): n = A,T,C or G
caacatgccctacagaccaccancaccanatgatgtagcactgngcggnanacgtgttgtanatgccctgtcaactnttcatnangcccntagcattatggggccgnctgaagnnnncatgantagcatgtcnancgnccgagggncnttggcccancaccntngggcactgaagggcncatgtactcaccaccancacttttatcctgtgcacacatgtgcatgttttgctgcacaggatnnngcgcgaaatgtcagaggacatcttctagagagcctcacngcctgacnaggttncagtgcgatgcctgattnactctgagcaccagggttnaccctggtctcanatttgnctactccctcttttaacaaa

SEQ ID NO: 2167 - DNA, 373 bp, Homo sapiens
  misc_feature (1)...(373): n = A,T,C or G
ccagaacatgattcattcggtgaaaggggaccggtgaanccttgntntannnnctngcncnaaccnnactntanggtnaggctnnatcntggtgagaatacanaaaacttcntctactgaactatgaaagcaggaatcaccacgtggaggagttgactggccgggcaagcatanagagggnatccgttgagaccccgcggagcctgcacngttctgcagacagctgtagcttccatgaacctgtccccgccctgggaagggcttcttggtgaagcaactgcttttggggcatccntggaagtnaccccctcacacaagagccttgttagtgaccnccccccaaaaaaaaccgggngggttcgaaaaaaaaaaa

SEQ ID NO: 2168 - DNA, 372 bp, Homo sapiens
  misc_feature (1)...(372): n = A,T,C or G
aatcttgcgaggcccaacaganggaggccagngnccttgatcggnggntgattcttaancttgaagncnaccancatctcctccaagaccagagccantgaggcccttaggaanctggcccanattganaccaagatcctgaatcgnaagcaggtgcccatggcttggtctgatgnggantctgactccacatccatcgagcagagtcttcctaagaggacaggtgcagcttctgtttcttcccagtacccacacagaactttccagaaacaagngaacnaaacatgtgngtnanagagcgatgggccgagtggtaacggtagcaggtttctgaagaagaaggagctgcccactgaagcgaggtccccaggg

SEQ ID NO: 2169 - DNA, 371 bp, Homo sapiens
  misc_feature (1)...(371): n = A,T,C or G
aagggcttgaactgtggcctgacnacagccgncctntgaccangnnnnnannccccgggagcngcttgtgcaaacttgcatgtcaacagggcagcctgctacttcaccatggtgcgtccaccatcctccaaccccctaccctagccgggccccgccccccagccttgccctacacgcccttagcctaggccccgccccccagcagtgccctacacgcccctagcctaggccccgcccctcacctcttctcagttctctcctattttaaaagacagtgtctcattatgtagctccgggctagcctggaattttcagtgtattagaccaggaattttgtgtatacaactcanaggggaacacacacttgcctt

SEQ ID NO: 2170 - DNA, 370 bp, Homo sapiens
gactgagcctccctttcaggtaaaaccagtttgctggaggctgctggatggctacaggtggcacctgaatgaagggcctgaaaacaggggaacctactgagaaacggtgtcttgggtggagctccatagaaaacacaagaaaagtgaaagtatccatgaagcatgaaagaaaatggagcctcaatgactgcctgaaagattggttcatcaagtggacatggatcctgggccttgtaataatgatgataccaatgatgaagacagttcagaatccctatcagccagctaagttgacctggagcgttgtctctatgctcactggagatcaaatacactcagctccctgagacaccatccttaaaaaaaaaaa

SEQ ID NO: 2171 - DNA, 368 bp, Homo sapiens
  misc_feature (1)...(368): n = A,T,C or G
gactgaggtgctgataatctccttgtgcgagcnaaccgggagcgaacagcccatttaccgattgctaacgaatacgacttcgcattttccagacaaaagggcgttaaaagagatccgatgcaaatttattcttccctggtaaaggagtgttctcccgaattccattttatggagtataccttaaagttaaaggcagcaagttcattttttagtcaaaagcactaggtgccttactagctgtgtgactgctacatctggtggcagaacacttgcatgcaaggagccagaaaacttagaaaacaattgtaaccgatctcagtgcgtgttttgcagaaaccttcaagcaggaatttccaccaaaaaaaaaa

SEQ ID NO: 2172 - DNA, 366 bp, Homo sapiens
  misc_feature (1)...(366): n = A,T,C or G
caccatgagctggaaacctgtggcaggacatcccaaactcaaactgcattactgagagcaacaccatnctcacctttaggtggcagctccttctcccactcacatcatcctacaganaaggtggagaaggtggagagcgatgacacggactgaggaaggattggaattgatgcaagctccaggctttgctccattttctgaagatttacacatagatacctctcaatgggcagtagtcttaaatatagctaatttcttaactaatnaantgattctggagttttcttatnctttaaatgctgcatagtagactatcacttgtaattactcttgattccttttgaatttgnactgtcaaatacaggt

SEQ ID NO: 2173 - DNA, 366 bp, Homo sapiens
  misc_feature (1)...(366): n = A,T,C or G
cgagccctgggctggaanccctaccggctccntgntgggaaaatagacggcccggcctgacgcatntctgcggtaccgcgaganccgggacnnccgcnggncnggcngccntgcccccgnncgccnctgcaccnctacgcctggttccgctcctctggtcaggncngttttttaagtcaggtgtgggggtacacacctttggtcctagcacnttggggcttcagaggcagacgaatctctgagttcaaggacagcttggtctacaaagccagtccagggcagccagggctggttatatggctacattgagaaaccctgtcttgaaacaccaaaaccaaaacaactgccccaacccaaaaaaaaaaa

SEQ ID NO: 2174 - DNA, 366 bp, Homo sapiens
  misc_feature (1)...(366): n = A,T,C or G
gactgaggcacaacacttgaagangacgtcctcagcgtcgngntgggcgttccntggaacggagngacanagctgcctgagangngcaaaaaanactanccataacattcatgactgtccttaaangacagatattgactcctgccccggtgagaccctggaaaactggacaggcntctcccatgccacagtcatggtcagaaccacagccagagaggcttcttgcacccactgctagaatcaagagcctagaaggaggcaatgtttctgcaggccagcttccctagggttctcagcctttggcaattgtggagatgtgacttccatgaatataaacagaccatactttcctctcaaaaaaaaaaa

SEQ ID NO: 2175 - DNA, 365 bp, Homo sapiens
  misc_feature (1)...(365): n = A,T,C or G
tatgtggagcacaccnacttgntccatttcctancancancancagatgatgctgcantnanacgtcnttcccnccctcatnctctnnannagctancagctccanctcatccaagcctgtatcacgacgngtctncagcagnggacattcatttaaaccctgngctttcccatnacacngaggactnggacaagtgatacagcgtagctttctttagactagttaatatcccaattgtcttanggattccaaaagagatgctgcacctagacagtaggaagcagttttaagagaatgatatccctttcccccaaaaatgaggtggatgttttttggtcatttggagggtgatgaatgtgtgttg

SEQ ID NO: 2176 - DNA, 364 bp, Homo sapiens
  misc_feature (1)...(364): n = A,T,C or G
cgcccgggagccgacgnccggggcccacgacttttcncancctgctgactgctgactgccacctaggcttctgtaagcgctacactgttcacctccacactgtgggtttagaccagtgtttctcaagcttcacaatgctgagaccctttaatacagttcttcatgctgtgctgacccccagccatacaaacattaagagaatntcnngtcanttacaggngncangaggagcatacctatgaggntcgagcgggnaagaaatncntanagggcnncatngnnntntncaaangcangagtgnnganagagngaatcaacgatgatggagncatnccctgttnaagtaattaccattccagggtg

SEQ ID NO: 2177 - DNA, 361 bp, Homo sapiens
  misc_feature (1)...(361): n = A,T,C or G
atgaactggggtgaancngatcccgtgggacctatacctgttcntcnggaccgcgtgtggagcccnncncctaccccgctgtgccangggatgncctngcgacnnncnnnncccctggctnntgtggctnntatggtncccnntnntcntgggtanggcancgtgtcccctntccncccgccctgtgggtccgaagcagtaccccntccaatanntctgtacctggcgcggggtggtgcgcctcccaaagancctgagcccgtggttcactatgatatctgaggaggcttgatgggctttgtgccctcgttcctagaggcttaaccataataaaatccctaataaagctcaaaaaaaaaaa

SEQ ID NO: 2178 - DNA, 360 bp, Homo sapiens
  misc_feature (1)...(360): n = A,T,C or G
gaggatggccagaagcgcatatggttacgaaggaataagatcagcgcagctgaagagcagagccaacacagggaaggaatgttctggagactcagacccgtggctgagtgattttgagtaaaagagaaatgattttgcgtgttaaaaagaacagcaacagcaatgaccaaggaacacatcttattcaatttttgttgaaaggagatttanaaatagtttatctggtctggaatttctcaacctcttatcaatattgacatttggatgggatagtttgttgccattgaggtaaaagagtaagctaaataaattctacctgcccccatttctttcagtacacttcacagaaaaaaggaaaaa

SEQ ID NO: 2179 - DNA, 359 bp, Homo sapiens
  misc_feature (1)...(359): n = A,T,C or G
tgtatagcttcaactgctnntcccggtntgaggnatgangganncacngacaggatactccccngntcattggngnatctaaaatctgannnnctgtacctcttnacngtgcctgtnancntnggccanaaggctganaangaangncatggcctgtacgncttgggatggaaggtccaaacccctttcanccacntgtctgcagtgtccggagnctccacccctggtctgnttnctccgaaccactccggggnggtttggcaagaatatcgtctganaatactgacctggtgtatttgttctgttataactaaatacctgagactgaataatctataataaaaagtaatttttcaaag

SEQ ID NO: 2180 - DNA, 358 bp, Homo sapiens
  misc_feature (1)...(358): n = A,T,C or G
cttgaggaggccttggctactgtncttggctggttttnngtcaacttgacacaagcaagggccatcagagnggaaggagcctcagnngagaaagangtctcagtaagacccagtggtaaggcattttctcaattagtgatcaatggggaggtcctgtccaattgtggatggngccatccctgggctggtagtcctgggttttataagcaggctgagcataaagcaagccacaagcancaccccttcatgacctctgcatcagctcctgactccaggttcttgtcctggcttcctttggtgatgagcagcaatgtggaagtataagctgaataaaccctttcctccccaaaaaaaaaaa

SEQ ID NO: 2181 - DNA, 358 bp, Homo sapiens
  misc_feature (1)...(358): n = A,T,C or G
gactgaggcggaagagcatgctgctgangtgccgnngccttggcttcngnccggaccangntnnccaccagtggaagaaatagaangggaanttttggctgccaatcatttccaatggcatagttcccaccttttaatttaaaggaagaagaagaagaagaagaagaagaagaagaagaanaagaagaagaagatgangaagangttgaagntgnggtcntngncttctttcgtcactaaccgananganncgactattatgaaganancntggcnnntntcaaangacagccagggttgagttctacagccattantcacactcctctcntgctgtnccttttatcttagtttcata

SEQ ID NO: 2182 - DNA, 356 bp, Homo sapiens
  misc_feature (1)...(356): n = A,T,C or G
gcccctcttcccatgaanatagaacctttnanaaacactttgnggaagctgggagagatggcccatgagggtaacganagcacttctctgatgctcttgcaagggaatggacccagcccncacttggcatcacaancatcagaaactnatgtnctaagantnnntgctcnctcttctggnctccntnangaactgnatgcacagtgatgcacaaacatacatgcaggaaannatgttaaggctctntnatacntaaaaaagacgaaaaataanaggannancttggnaggntactcccntggnggctctggtgggcacccagggccgccatgctgggggtctgggcaaagagttct

SEQ ID NO: 2183 - DNA, 356 bp, Homo sapiens
  misc_feature (1)...(356): n = A,T,C or G
catcctatgcttcgctaccctggnatganacntccctacntggcaccatangnnnagaatgttaatcgattgcatanccngtangaggagntcntgggngatggacattaagtccgntagaaaacangngcnanaaaccacgangggtgactatcaccaccatcatggtggcccacaaaagaaacccgagggtggcctctgcttcagttctcacggctaaaaaaaantaccatctgttccaaaactgtatccagcccttaccctacaattccatccccctttgccaaaggcagaagatcctccacaacagatatttaacacgcaaatccccagctncaaagtaataaaataaaagc

SEQ ID NO: 2184 - DNA, 355 bp, Homo sapiens
  misc_feature (1)...(355): n = A,T,C or G
gagaaggctgacagcaaaggagaaaaagcctttgaacttgtcaaacttgatagcaggttttgctaaactaaccacaccntcaagcnggaaggctctgtgcaggttcaacatacggccggcagagctttgctggctgcgcatctccacacaggcagaacacctgcttcatcttcagcactgtgaatagtgcctggaatacagcaggcgctggagagaacgggttgggccaaattggaggaaattgttaaaactaccggngngncncccgggnnnnccggttgggttgcggnatttttggcccttgttaaccttcacccaggnccccccctttaaaaaaaaaatgccccccaggaaa

SEQ ID NO: 2185 - DNA, 353 bp, Homo sapiens
  misc_feature (1)...(353): n = A,T,C or G
actgcccctgttaggaaggcctcgccggaaagaccgtttgnccacctcactcttcnttgccttctagcttgnggagaactgcgatgtgaaagagtcttgcctttgaacagnctcagctagcnctagggcnggccccactttctttttgggtatacatcttagggactatgtcagaacttcgttntagccagcttattgcagtctttttaaaaattgctgtttagctggctatagtngggacatgccctataatcccagcngnccaggaagttggggcaggaaagactntatgcangttcaaggaccagcntggccttatctnaaaacaaccnantcctgctgtgcttgactta

SEQ ID NO: 2186 - DNA, 352 bp, Homo sapiens
  misc_feature (1)...(352): n = A,T,C or G
gcccattagagggcgggnggagganaatattccggaagctcaacctgatgacctgaaaaagcatggttgaagctgactaacaaagtcagaactctcaggaagatgcagtttgcgtgaggacagctatagaagaacatagaaatccacatgcttggaatctgagttctgtaaaccccctgtactggctggttttgtgtgtcaacctgacacaagctggagttatcaccgagaaaggagcctcccttgaggaaatgcctcataagatntggctgtaaggcattttcccaattagtgatcaaggggggaagggcccattgggganggtgccatccctgggctggtagtcctgggt

SEQ ID NO: 2187 - DNA, 351 bp, Homo sapiens
  misc_feature (1)...(351): n = A,T,C or G
caggtcccactatgtcgcccaggttgccatcagngacagctgggactgcaggcncanagtacctggaccagnagagntnnntattnttgatggaagtagattatgggtctcaaatggtctcacatcnanaanntgagtcacctntantntacagggntaacantaaantgagtgatgataagngcttctgaaattgttntacttgngctgnananatggctgagaggttaagaacacntgactacttttccagaggttcttgagttcaaatcccagnaaccatatggaggctcacaaccatctgtnatgagatctgatgccctcttctggtgtgcctgaagacagccacag

SEQ ID NO: 2188 - DNA, 351 bp, Homo sapiens
  misc_feature (1)...(351): n = A,T,C or G
gactgagatgatgctcatgatgcagcaggaaccngctnnganggagatagagcacttcttngaggactcatctgnncaagctcgngtcagacaagcgcctggtggaggagaaagtgagccangctgaaggaggaggtgcggctgcaagtacgaaaagcctgcaccagcctgctggatgaagacttgcggcagacagtggaggtcctggacaaggcgcaagccaagttcttgcagcgagaacgcgggcgcaggccgctgcacccttggggagccgcatgcagggaggccaagaagctgcctgggcctccctgcaacggtctcntttnacaagacaagaggacggtcggcctt

SEQ ID NO: 2189 - DNA, 351 bp, Homo sapiens
  misc_feature (1)...(351): n = A,T,C or G
gacctctgctgaccttgtggagccntctntntcaatttcttanggcacgaccgctgcttacntgacgcctgnttgatgtttgccantaaggctggactgcctnctattgactcatgttaattagnnntgnactggnctgatgatattctaacaacagagatatgccaatntcccnaaagaactactctctaaacangtccacagccctcatttnctactaacctttttatcccccctacttgtgataggacggactanaaggatgatgaancattcaagaatacaaagctangnttngnaaaatntaagcctatagaacaaggatatgagtatctgattactctgtagtac

SEQ ID NO: 2190 - DNA, 350 bp, Homo sapiens
  misc_feature (1)...(350): n = A,T,C or G
aaggattaaacatggnagccggncccgcttccttctgaattcacagnccgatggcttacctgancaggnagttgcaanacantcanaccannncctgatatnnggnntgccngcgcacccntnaaatnanngcnattnttaaacccgtgacactnacananaggacaaaatgnttttaactcannagactcttntgcaaaagtgacttgtgggctggagagatggctcagcatgcccaactctcggatggtagctcacagccatcactgactctagtcctagagaacctagtgcccccttgtctgctctccanaggcattgcacagatgtgatatacagacacacatgca

SEQ ID NO: 2191 - DNA, 350 bp, Homo sapiens
  misc_feature (1)...(350): n = A,T,C or G
gaagagaagggtctgaacaaagctcttaacaacgtctgcctnttgaacacagcagactgntggatctttanacannaagntcacnntttgactgtgatncctgtctcgacatgtcngngaccctgtgccaagcagggaccaagagtgttacacaggatgtgtaacacacaccncacaccctgagagnacgtgnnattatgaatcagattgtggacgnaatgggggaagtcagcgaagacaattcgagacattgtntcganannntatngctagnnggcaaanacagtganntgtnngaaagccatcaacatcacaaataatnaaatagttgttgttaaaattctcaagcc

SEQ ID NO: 2192 - DNA, 349 bp, Homo sapiens
  misc_feature (1)...(349): n = A,T,C or G
agggtgcgtatcatagcatnatgatgaccctntctcnntggccctgaaggtnaaggaaacctgagcacgtgnccatanagatgcnantnnctccccnagcncaggtcatgagtggtnncaagagcccaagggatggntgactttnatancantcaattattgtctcncgaccacatgccatagcctgcttttgncatgtattctgcagagcccaactnacctttnctnaggcaccntgctcctcatttgctcttctctagagctctagtgcattntctnatcctaagcaaagggcctgggntnccaatagctatcaactgctattgcttcaataataaaattccctctc

SEQ ID NO: 2193 - DNA, 348 bp, Homo sapiens
  misc_feature (1)...(348): n = A,T,C or G
gccagcaggaaggaaggntccaggtcagccngagctnntnantncatgncctgcatgggaagtgtgtcttcagccgagagagactcttaccatctggctatggatgagcaatgaagagcaatgcacatcagcctgtttgccacatccatgctccgtctccaggnaattgacctaactagggcagcaaaggaatgaagaaaggacagacacagaanagcctgagaggggcgaagtgtgctctgtgatggagaagctgcagtaccccctgcctttgacagcagcgtgttgaacatacatagctgaacagggaagcagagttattgcatactgttgaagcaaggaggcagg

SEQ ID NO: 2194 - DNA, 346 bp, Homo sapiens
  misc_feature (1)...(346): n = A,T,C or G
tgcttataatttagcaggcctactgactgtggggacccatccccaatagatacatcctacagatgaacccaaggcgtcacaaccttttgnaagaaggggcaccaacactgaanaatcaggcnaccangaagtntgctgngagattgtttntctaaggaataacaggaaagcagcatnanccaaatatcnnctatatggatggctnncagaactanaacagagacaatttcaacaaacatggcatgtcgncatgtgcctgttactcccacacncncagaacttgtgtgggaagatttcaagntcaagactagcctaagntatgnatanggctatatctatgaagaac

SEQ ID NO: 2195 - DNA, 345 bp, Homo sapiens
  misc_feature (1)...(345): n = A,T,C or G
gactgagagaaaggaaacaggctctgananntaagcaactcatcccacttgctcaaccagcatatgtgggagacctgacaacccgccctgtgtggcggtttcacaagccaacgcccagccacaggggacgactgttcctgggactggaaggngtgnatacggctntgtnctntcaaaggtcanganagggnattanancccttgattgtnaattnacggctgggatggtgtgtgacccaccattcggggnnggantncaatctgtgttntctgntanagcaacgagngctcttaaccactgcactgcctctctagacctttttgggtagaatttaaatcatatca

SEQ ID NO: 2196 - DNA, 343 bp, Homo sapiens
  misc_feature (1)...(343): n = A,T,C or G
acattcttggaaaggacgaagaagggcctctctgannatgtngtatttggtactgagccccttcaggaccggagagagcntggcntcttggggacngcgcatgcaanggtccctgaggccccttggatgccnttgncctgcacgaanagcctganagngnagaggtgcctnnanatgnnccatcaagggannganagcagancccttcgacaggcaaaccaggggaagttgtacacagagcccgacttcctgtctcatgtgctcttctgcatgagtggcacggcctctcctccctcttctctgctagaaagacaatgtccttccagtgttcacaaaaaaaaaa

SEQ ID NO: 2197 - DNA, 341 bp, Homo sapiens
  misc_feature (1)...(341): n = A,T,C or G
gaacttgagcggtacatgggtttcagggntcaattcaggttccgggctttcttcagccactgccttanctgctgaactctttcactttgcgccgaagcggnaccacaaatgctggngtangagantggaaggtttggctcancagtttaagancacttgctgctcttgcaganggcctgagttcagttcccagtgcccaccttgggtggctcaccactgcctgcaactccagctcccggggactggcatctctagccaccgctggcacccgtataccccttacacagacacatacatggacaaactaaaagtaatcaaataaacctttaaaaagtaaaaaa

SEQ ID NO: 2198 - DNA, 339 bp, Homo sapiens
  misc_feature (1)...(339): n = A,T,C or G
tgctggtacacgcatgtggcncaaactagcaccggcaagtgtatgtaggactcccgntttccttagncgattactgncaatgcccattgacttccatgnatgtacccggaggatnttntggccgcagattggctgcaggttggagcttgtcgattccggtggctgtaattagnatntgggtagcacttcctcccacaatanntaaacaatgtancaggnaacacaaancaagctgnctnagactgnacaaagttgangcagactgnggacagannaggtntgngggtacnttgnaggtgnnctaccttgtaaggaatcagaacatttggaaagtggtgg

SEQ ID NO: 2199 - DNA, 338 bp, Homo sapiens
  misc_feature (1)...(338): n = A,T,C or G
ttccagctcggtacccggggatcgaagttcctantgcgaagagncatttccaggcccagggtgggcacccgcntacctgctccttctgcctgaccagcatcctcaggtgtgcatccattntctccaggtgggtggggcagctgggcgggtctgaagacagattgcacactgtcctgnngagnggnggccagcacnaatncttcatggattctggaggcttanctcaaatcaagantgtnnaatttattgggctggagagatgcctcaccggttangaacactnactccagaggntctgagttcaattcccancagttacangggggcttacaaccatc

SEQ ID NO: 2200 - DNA, 337 bp, Homo sapiens
  misc_feature (1)...(337): n = A,T,C or G
cgccaagattctgaacatncttgctctgntcatctacctcatctttctacatcatagcttatcngtttatacagctttaacttactaaggntacccaaagataattagaacccactaaggtacggtactaactagttagggtangctaattantaatttanctaaaacttagtacccgaatttaagatctttnaggancctattaannaactaaaggggggggancttcattgcccttggccaaaggnantgggnctactaaantgnttccatgcncctggcctnngggaannaaagccttccatggngctttgncccttaaaagttgcccctttaa

SEQ ID NO: 2201 - DNA, 337 bp, Homo sapiens
  misc_feature (1)...(337): n = A,T,C or G
aagactgcgggcatangnctgccgcctgcttgaccgccnacgaccgctggccgcggtggcggactggacanctggccttctgcttaactcngcggnccgccttctctgactccttttncctttccttgangcccagnaggcncacgtacattcctgcaacgtggataaatagcaaattagtanttgtttgaagcaanatgaantgaatcanattgattcagcangaaggnccaaaaccgcntcncaanattgngntcacggcntttggtgtgntgaacccnactncagatccaanacgatncatggtggttaacagannccagcaattgagaactgg

SEQ ID NO: 2202 - DNA, 335 bp, Homo sapiens
  misc_feature (1)...(335): n = A,T,C or G
gccttacagttggccatgtncangnancgnanggngtgcaggcacctgttgacattaaccatgacaaantctnnctggantcagnaggggacgatcctccagnatgtcagacctatggngganagcagatantcgtcccgagcaaccaggcgnctgtacaagactagtatcaggaganangcatgacctancagatcccggaccaatgccgnntgcgcangtntatcccngagacnngtggtgangacttctttctgtgactcttgcatctnaaacaactaaagaacngaatganccntaactaaggaagagaaantccgacttgatgaaaaaca

SEQ ID NO: 2203 - DNA, 335 bp, Homo sapiens
  misc_feature (1)...(335): n = A,T,C or G
gactgaggggaccccttgacaaggcagctgcggctgagacggaggtagccccccagcaccaagatctcctctgcagttgggtaccgcttcttcccagatccagaccctgcagcatcagctgtagcagggttgactggaggggctgggctggcagggggcgcacacctccgtgggttgacagtgaaggtgtgtccactgccggcggggggcccccacccccggtcctggtttcacccnatanaacanacggctnatgaggggatccccagagggttggggggcanttgggcccgagggnggggnaaacanaggggctggtgttggggcccggggtt

SEQ ID NO: 2204 - DNA, 334 bp, Homo sapiens
  misc_feature (1)...(334): n = A,T,C or G
gtctgcatgtgtatgccacaggntgagggaggctttccactaaactgtnncactgaaacctcttcttgatggcctctctgtggaggacgtgagcaagtgagaagggaccacttgaagactctgaggacagataacgggtgacaatcacatgccctgcatcagcanaaacttggagggatgtcaaggaaggaacaggcntctgggtgactganacacacacagataaaaggccctgggggctgaacgtgacagnccatgcccatgncccanntntgaaagtcatgangggatagcttgagcttcttagaaaggcattgtctcaaaaataaacaaa

SEQ ID NO: 2205 - DNA, 333 bp, Homo sapiens
  misc_feature (1)...(333): n = A,T,C or G
cgtgagccgccacctgcagcccccacagtatgtggcccgggaaccccctgaaggcaccccatctgatgtggacatggacgggtcctcaggcacctactggccagtgaactcagaccaggctgtgcctgagctggacctgggctggcccctcacatttggcttccaaggcacagaggtcaccacactggtacagccgccgccacctgacagccccagcatcaaagatgaagctcggaggatgatccgctctgcccagcaggtgcattctcacgggcttgaangatggtgaaaggcagcccaagcccgggttttgaagcatgaataggagggtgg

SEQ ID NO: 2206 - DNA, 333 bp, Homo sapiens
  misc_feature (1)...(333): n = A,T,C or G
gtgtcccggactcctggagtcttcatgagatcatgactccccctcncccacnggtgtgcggatgtacctncntactccctcataacccngggacggtggaggcaggtggctctgggtttgaggacaacctggtttacntnctgngcgccacagtgagancttgcctcaantaancacgaggncancaagcangacnngtatcccattannganggtatgangagccaccntnnngttgntggaaatagaacgtcaccgactcatacaaaaaccaccactnnattttatccacnnganccatccctccagccccatcaataaactttccatact

SEQ ID NO: 2207 - DNA, 333 bp, Homo sapiens
  misc_feature (1)...(333): n = A,T,C or G
agactgaggtcccccctgtggaacgctcctcccatccatccctcctttattttgatgtntattaaatgaacgtattcaccttacnnnccngagngananncgatgaagancanancncnctgccacgaggcccancccagggtttntccgacggagaggactngancgaggccgtatcatgctctgnggaccgcttcagcgataccaggataaatacnagctgagaaaggctcggangctgagcactagctcctgccgggctgggagagagatcctggttttgatactaganagcataggaaaattgatantcaggcctagcaaaaaaaagaa

SEQ ID NO: 2208 - DNA, 333 bp, Homo sapiens
  misc_feature (1)...(333): n = A,T,C or G
tcccgctgctgcaccacntgcntgctctgntggctntggcggcaggcngcntgtngtgcaccattggaactactanacanctgnntncagtgaacagtcntgcngctgctagngctccttgaaccttgaacaagtgctcttgcatgacgagccacctctncagcctcaacntgtgtacttttaattattcttanngtattagatgagtcactgaatctaggtaatgaaataattcattcaaaatctaaaantaaactgtttacttttaattatgcttaangtatnanatgagtcactgaatctaggnaatganatanttcattcaaatctgca

SEQ ID NO: 2209 - DNA, 332 bp, Homo sapiens
  misc_feature (1)...(332): n = A,T,C or G
gactgaggattagaatggcgatgcgtgggctggtgagatggctnancggctaagagtgccggctgctcttccataggncctgagttcanatcctagcaaccacatggtggctcacaaccatccgtaacgaaatctgatgcgcctcttctggagtgtcntgaagacagcttacatgttgtgcttacatataataaatatnanaatnntantggccatccagtacgcgaggcatgaanggtcncactcttttnaanganaggantgacgcagacgagagtgagcggaggtgtttaatagaatgcgaggtcannctctggctactccagtgagtt

SEQ ID NO: 2210 - DNA, 332 bp, Homo sapiens
  misc_feature (1)...(332): n = A,T,C or G
accaactgtaagcagcttgcanctgggcngcgtgctgaagaggagcccatttcatcaataaagtgcacnagtaananggcaccngntgccgttanaggtggttgtgagctaccatgtggttgcctgggatttgaactccggaccttcggaagagcanatccatgcatcttaactncctgagccatntntccagccccatgcctttgtntttcttatagaaaaaatcaatgcgttannttatagaanaccgaggattttctgtatttgcctaccataattcttcagccattgtaagtatcanantgattgtatttttggacagttttgtgtta

SEQ ID NO: 2211 - DNA, 331 bp, Homo sapiens
  misc_feature (1)...(331): n = A,T,C or G
taccagcatggctgtgagggcngtgatgacatcctttnttggccacgaatgncagaacggagcntatggcaggggtgagcnnctttaagctcttannnacangatnagcnaccctgttctganaccaccctancngntccaaaatnatnnccggntgtanccaccgntgtcgcttcagagtaaaaaactctatacctgcggaactgtnncgtccctcaaattatnanaattaccatgcntggccgnngntatggctgataaanttgctactgatctggtatgtggagaggccctggggtcactttcaggctngggactggagaaaccatgt

SEQ ID NO: 2212 - DNA, 331 bp, Homo sapiens
  misc_feature (1)...(331): n = A,T,C or G
acccactttccctgggtgactgnacttgggacnagncctctanccatgannanaaggcagaggnanngtggncncttntnccnaggacagntaannantctctatcctgagctgccaagctacctancacttggtngngagggcctgcaggccntgcccctgcctanctgngaanaaaagggaaagagtaaagacaattgtccagcactagcagtctcaggccccaaggcagaggggcccanaggcggtnaagcgactcttaccccgcccccaccctgctgctgagtctgtctgangttttggttgnatgaataaacataattcccctctg

SEQ ID NO: 2213 - DNA, 330 bp, Homo sapiens
  misc_feature (1)...(330): n = A,T,C or G
tcatacctgaaatggncgtacactgaacaggganacaagaacaaatttagtgccaaccttanntacaatggccactgattctggggagccagcctagcacagaagattctgagaagcctgatggagtttcctttgaaaacagggcctgcccgggctgttgcccctctgactgtagaagcgagaataaaggaaaaatacagtaccttttctgcttccggggaaaacatcgaaagaaagaggtttttccgaaagagtgttgagatgacagaagatgacaaagttgccgaatcttcccgcagagatgaaaganaagctgcaacaaatatttca

SEQ ID NO: 2214 - DNA, 329 bp, Homo sapiens
  misc_feature (1)...(329): n = A,T,C or G
cggtgtccacgtttcggccnntggaggcccggcccgtcccgccgagaggcctggatcagtgatattcgtgctgtaaccacccccacatgcgggaaccacatcaaatcaagctgcagcttgatcgctttcaactctgaccgcccagncatccccacagacaatccccctncttgtattggaccttgggctgggattgatcacnatgaanatttgaaaagtccttgtacagtgttgtgttgctatntctgcactccaggaggctgaatctggaagagtttgagatgcaagccagcctgagctactcagaccccatctcaaagaaaacaaaa

SEQ ID NO: 2215 - DNA, 326 bp, Homo sapiens
  misc_feature (1)...(326): n = A,T,C or G
caatgttaaactgaagangttactaaaatggccctctanantagcccancncttnttattttgtttgtnctatggattagcctcttacnnacttnctgacccttaatacacntgcaannnanacttgngntcggtntcatatntccatntntntcataatttttctatttattcttgnatnacttnaattgcccattaacactntattcatgtncgatattaatttagaacaagaatgattccnttgcctnaggaaactttactagtgtggaaagnattttattgaaagtccctgctntctccgagtntgaagtcaaaatattaaa

SEQ ID NO: 2216 - DNA, 325 bp, Homo sapiens
  misc_feature (1)...(325): n = A,T,C or G
aacgactttcctctcttgcccaaatttgancctgctacctttaactccaagctggnattggtgtataatgnggntgataatcaatcaaangtacttggatganggantatcacctttccnagtagactatnnaanatgacanatcnctaagcaaggataanctggccatacacctgngagaacctgatccttgngacttgccantcaggcntanaaaacgatgaccacttgnatctgctttaactaaccatatataaggacataatatctttgnagaatgattttatctcgcanataaacattacttaagtcccaaaaaaaaaaa

SEQ ID NO: 2217 - DNA, 323 bp, Homo sapiens
  misc_feature (1)...(323): n = A,T,C or G
actgagtgagtgcatctgctttatcgctgctgctgctgctgctgctgctgctgctgctgctgctgctgctgctgctgctgctgctgctgctgctgccgccaccncatctttncctgacatcagannccancntgcttggtcatccnatgaggacctgaanaccagnanctctccaggaatcttccangccttcagcaccanattgnnnctgctgaggaagannccantcacatngactaaggagctattggnntcccanattctccanagaggagtaactatgntngnactaacctagntnatggcatgtttctgcaccatcc

SEQ ID NO: 2218 - DNA, 506 bp, Homo sapiens
  misc_feature (1)...(506): n = A,T,C or G
gactgaggatggtctctaanagctncacaagacgaggatgccctnatatcttctgcctctgacctcaagngctgaggtagnctacatgcagcggagtactgcagctcaagaactactgggagttaacacccaagctaagcttcgtgaggcttttctgtgtgtctggccgcctganaacacagccgacctgcgtggtgaccttgacctgaccagagctctgtctcagatggcttccatagtcatgggcagtcagagaagaggaaacaggcccagagagcgcacacctcgctaaggngtccagggattagatgngcacactcctgctggcctacatatcctgngtggncctgaanctctcatcccacccacagaagtgaagatggncccagaggcgggaggngacccttcttggtcagctttcaaacaggggcatgcgcatgagcagngttggccagnggnacttacagagccacttggctgaatntnctcacccatcacgacatgtt

SEQ ID NO: 2219 - DNA, 374 bp, Homo sapiens
  misc_feature (1)...(374): n = A,T,C or G
gactgagggtccctttcacctgactcctactgcggccctgggacttctgcatccccatcaggacaagatcattgatgaaaacaaaaagtgagacaagggctggtgagatggctcagtgattaagagcactgactgctcttccaaaggccctgagttcaaatcccagcaaccacatggtggttcaaaaccatctgtaacaaaaatctgatgccttcttctggagtgtctgaagacagctacagtgtacacacatataataaataaataaataaataaataaatcttanaagaataaancctncagaaggctgcaggagntgttcnnctgcatanngaanctgngcncganngatcagggtctaagattttcctgg

SEQ ID NO: 2220 - DNA, 358 bp, Homo sapiens
  misc_feature (1)...(358): n = A,T,C or G
gagtggggagttaggaacaaaagaggagaacntgggacgggcagcgtacagtaaantacactcgggctattatctcatgcgctnacngaactgcagtgctgcttctccgcacagggaccttcagtttcccaggcagctacaggcagggaggcttcaccacccattctgttaacttccagctcctggggggaaccagccactgggnctntggcagccgccctcacttccatgcacacacacacatatngttaaagatgacgcaggaggagccaaaaaggacaagacagaggatataatcactaaggaaaagcagctgcagtcctgcactgaaaatatgataggaatgtaaaaaaaaaaa

SEQ ID NO: 2221 - DNA, 328 bp, Homo sapiens
  misc_feature (1)...(328): n = A,T,C or G
ctggagttcaaggtaattgtgaaccacttgntacggnttgcgaactaanttcagnaacctctgcaagcaacagcaagtgcttttagccactgaacagnctnttcggccctgntcttactccacctacctgtccccaaattccattnattctactgtcttcggatggaggacacaccatntagcaaactggtggcttntgcaggctgnntaaaatgaacagtacncgcccacacccacagactgtaccttnatattctcgccatccagaaggnctatgaagccatcattcctcatcggacaagggggcttttacagggtttcttactgg

SEQ ID NO: 2222 - DNA, 434 bp, Homo sapiens
  misc_feature (1)...(434): n = A,T,C or G
gactgaggtccagtccatccttgaaaaaaccagggcaggagctcaaggcaggaaccaggaggcaggaactgaagcagagaccacagaggaatgctgcttactggcttgctaccctggcttggtaaactaccctgctgcttatgcaccccaggacgacttaccaaaggatggtaccattcacaaagggcagagccctcctacacaaattagccctcaggaaaatgccccaagatgtgcccacaagtctgtctaatggaggcaattcctcaattaagaatttctcagccgggcgtggtggcgcacgcctttaatcccagcactcgggaggcaganacaggtggatttctgagttccaggccagcctgatctacaaagtgagcctccagggacagccagggctatacagagaaaccctgtctcgaaaaaacaaacaa

SEQ ID NO: 2223 - DNA, 389 bp, Homo sapiens
  misc_feature (1)...(389): n = A,T,C or G
gttgccctgtctatgcctaggacttcacagnacaagcaccaggantggngctcannctcccagcatacctgcctgcctctgnactcctgcatcactgggnattaaaggcctgnacccccaccacctgactctcaggaatgatgagagctcctaacagcacaccctgnaattcccagttcagccgctctcagtgctgcagctnacaggcaancagtggngcatagtgactggntaggtnccttngggaagcaagagcctcctggaaggcagacgatgggaggaaggtnntcaganngtacnaantngactagcncaaaganattgaagggaccaaactccaataananncactgncnagcggagggggtggtgggggctgggcaggagaa

SEQ ID NO: 2224 - DNA, 423 bp, Homo sapiens
  misc_feature (1)...(423): n = A,T,C or G
aactgaggtgtccatatacatttggntcattgcaacacaagtngtccagtggaccacccccaccntcccaagctggagtcacaggccacctanctgtgtgcntgggaaatgancttgggccctcttgaagacggaacaggtgcccttaaccacggaggaganatctctccagccaccccaaatacatttctttttaagcttctaggggctggagagatggctccaaggttaagagcactgactgtccttccagaggtcctgagctcaattctcagcaaccacatggtggctcacaaccatctgtaatgagatctgatgccctcttctggtgtgtctgaagaaagcaatggtgtactcatatacataaaataaataaataaatcttagccgggtgtggtggcacacatggccagctgaaaaaaa

SEQ ID NO: 2225 - DNA, 416 bp, Homo sapiens
  misc_feature (1)...(416): n = A,T,C or G
gactgagggatgcaaatgcagatgtggaggaccagaaaagactgcagagaaggtgccctgatctgagggnctnggnatgnacantcanctgtccatagatatcgcgtctancatgtacntcntggatttganncncnactntgaatagnaagtgtgangcctccatgcctgtaaccccatcaacccacgaggcccgagaggaagaagatcagaagntcaaggccggggcctggtgagatggctcagtgagtnagagcacccgcctgctcttncgaangtcctgnagttcaaatcccagcaaccacatggnggctcacanccatctgtaacaggatctgacgccctcttctggagtgtctgaagacggctacaatgtacttacatataataaataaataaatctttaaaaaaaaaaa

SEQ ID NO: 2226 - DNA, 396 bp, Homo sapiens
  misc_feature (1)...(396): n = A,T,C or G
gactgaggtggacatcgaggccctgtgggtggccctacagcgtggaagggatgaccgagctttgggacatgtcctggaaacctaaggtgctggagctagaagagacttgatagcacttcagagaccatcaggctgtttcgtggaacttccaccaaagagatgcagaaatggagactccagagctggagagagagagatgactcaactgttaaaagcactgactgctcttccagaggtcctgagttcaattcccagcaaccacatggnggctcacaattatctgtaatggggatctgatgccctcctctggtgtgtctgaagacagtgatggtgtactgacatatatgaagtaaataagtaaattaataaatagaaatgagactccaaaaaaaaaaa

SEQ ID NO: 2227 - DNA, 394 bp, Homo sapiens
  misc_feature (1)...(394): n = A,T,C or G
gcagccgtctgatgggaaaccccccagcctcctcttttatgggcagcttcctcaccagcagcctgggctcagcagcgtcggcacaccccagtggccccacatnctctccctctgngccggcctaccgaggatcccaccctgccacctctcagatctggttgtcccactcccatgaagctccatgcgtaccccagattttcggggagtctggcatctaccttcctacccgtgagccacttggatcaccatggaaacagcaatgttctctatgggcaacatcgtttctatggaacccaaaaagataacttatacctgcggnccngcaccggcctgncccactctacanccnaggngantggcantagncangtatctnttacctctgttgatgaca

SEQ ID NO: 2228 - DNA, 103 bp, Homo sapiens
  misc_feature (1)...(103): n = A,T,C or G
ccaagtccacagtaagcggcaagnaaactgcaggaacaccaaaagttttttggtgtgtttctatggagttctgacaaattcagctcaactgggcaatgtaagg

SEQ ID NO: 2229 - DNA, 359 bp, Homo sapiens
  misc_feature (1)...(359): n = A,T,C or G
ccccttacccaagagtganaggtcacagaaacatgagagaacagaggagctgnaaggctggattgatgacactgactgcttatccggaagancctgggattccgttcctagcacatgcntgcatgcatacatacatacatacatacatacnatacaccnaatngtacanaaagcaanangctngcagccnaccatnagactgagcacagagaccccaatggaggagttaggagggactgaaggagctgaggggatttatctgacatcaataggaggggaggccgttggtcctgtgagggcttgatgccctagtgtagatgaatgctagggcagtgaggggggagtgggtgggtagggga

SEQ ID NO: 2230 - DNA, 355 bp, Homo sapiens
  misc_feature (1)...(355): n = A,T,C or G
gactgaggaacacaggaacaaaaaatggtagcacaanctgaaggcaangaccatnctggnagngccccacctactgatgtancctgtctanagacaccaaacactgnggccantgcaagaggcatttgcatgncaagaacctgntatgacntgctccttgggagattcagccagcaacttgaaaaatatagatgtggatgccttggagccaaccatcagactgagctcaggnaccctggngggggggggggggagaaggactgaaggagctgagggggatagcaaccccataggaagantaacatcagctggacagancanccagggcttnnagggactagaccaccaaccaagg

SEQ ID NO: 2231 - DNA, 341 bp, Homo sapiens
  misc_feature (1)...(341): n = A,T,C or G
gactgaggtgacagtacagaaaagtaccacaaacgttatccaggcagctgactgacatggtgagacagcttgtanacgatgtcaagagccttcaaacgcaaagacccaacttgggatctggacaggacaatgcacaaggcaccccacccacggntggagagatggctcagccggttaagagcacataactgctcttctgaaggtcctgagttcaaatcccaacaaccacatggtagttcacaaccattcctaatgagatcagatgcactcttctggtgtgtctgaagacagctacaatgtattcacatataataaataaataaatctttaaaaaaataaaa

SEQ ID NO: 2232 - DNA, 186 bp, Homo sapiens
  misc_feature (1)...(186): n = A,T,C or G
aagcccacatactggtggaagagaatcaattctacaaagttgtcctgaccactagatatataaatggcaaacttcccccaaacacgattgagcaatgggaaatgcttcaaaacntgntttctagatnctttgtncgncctttcaaaaatnaaaatggccgggcgggngtggtggcgcatgcctttg

SEQ ID NO: 2233 - DNA, 320 bp, Homo sapiens
  misc_feature (1)...(320): n = A,T,C or G
gactgagattatttattatatatacagcgctatgcctgcatgtgtggctgcaggccagaagagggcactagatctcattacatgngggtatanaccncnatgnngcatgcattctnactgnctttngtnnnttngganaagacagcngcagctgtcatnactatctatgcattatcatccagccctcagccattgaacatctngatnctcctacttcaactcccatgcccacccccagtgtggaattacaagttcaattcctgatctttacagacaaaagtatcattggtctctgttggaataaatgtcacctttgacct

SEQ ID NO: 2234 - DNA, 370 bp, Homo sapiens
  misc_feature (1)...(370): n = A,T,C or G
acctgaggctggatagtgaaaaactganagtataacatcctgtatgacataaggtagtacaggcctggtatgacagtctgaattcaagcagctcatcacccagcatcgtgtttcaggctttaaggaaaattactaacaccgcagactgtggatgcacagtctctgcacccgagaacagtgctcggtacaaggcaagtgttccaatttgcaaggcaagaaggagttcatggtttttatgacttagcgtggaagccaaactatcactttcaccaaattcaacgtattaacagcaagtcaccaaccattcaggaaaatgcnttttccagtanaaggctgagcaatgactacatattcatgattcaaataagaa

SEQ ID NO: 2235 - DNA, 295 bp, Homo sapiens
actgagggtgctgccaagcatgatgacctgagctggacctgaggagccacactgtggagaaagaaaactgactcctgcagtttgtcatcccaactctatgtgcgtgctgtgacacacaacacatgttgaaactcacacacaacaaagggggtggaaaattggtgtgataacactagaggaccatcccagagccatcacatcatgctccaagaaacatttcaagacaattccctaccagtgagatatatgaatttcaaatagagaggacctatcaacagtagcaattaaaaaaaaa

SEQ ID NO: 2236 - DNA, 294 bp, Homo sapiens
gactgaggtctattcatgaagcttattgtgccctccccagccttgagcaggctggctggctcagaccttctttgccacagttgctagttcacctagggtggagtcttcctacctaggtaaagttttgtctgccacatctgtgcacatctgcagcttcctgcaagaagctacctgctgagcagccgagccttgtcttcctgatgagaaagtgggatcctggcacagtgggggatggattcccccctccctttaaagatcagacattaggatattaaagttgagccttgatcagag

SEQ ID NO: 2237 - DNA, 116 bp, Homo sapiens
  misc_feature (1)...(116): n = A,T,C or G
cctgaggctcccaatcccatggaacananatgggaactgngcttgctccagtctgaaatcctgaccaaaagaaactatagtataataaatgactttattatgccacaaaaaaaaaa

SEQ ID NO: 2238 - DNA, 280 bp, Homo sapiens
caaagactgagggggaggaccagatttgatcatcttcagacccggaacccacataaatgaaaggttggcaatacacctgtgattctggcctcaggaagcagagataagggaccccgagagcaaactgaccatggagactagccatactgtttctctgtgtaaccctggctgtcctggaacttactctgtggaccaggctggcttcgaactcagaaatccgcctgcctctgcctcccaagtgctgggattaaaggtttaatattcatcttaaaaaaaaaaa

SEQ ID NO: 2239 - DNA, 181 bp, Homo sapiens
  misc_feature (1)...(181): n = A,T,C or G
ttggccaccactacgtangncttccagaggacctgantttaccntgccagnaacctacncagatggcatcaccttatgatcctagnaccacgaaacctgccctcttccancgttccctgggcactggcacncatgtgtgcacatacatacaggtgagcaaaacacttgtataataaacata

SEQ ID NO: 2240 - DNA, 144 bp, Homo sapiens
  misc_feature (1)...(144): n = A,T,C or G
ctgcccttcaacttgaggtacaagtagctgagtccacacgtggttnanagcccatgaagaaaacancagatatgatggnggctatcttcaagggagcctgcaggctaggagccgtctcaccgtgtgtgtgtgtgtgtgtgtgtg

SEQ ID NO: 2241 - DNA, 241 bp, Homo sapiens
gaggaatgatgctggttagagtggcttggaattctttgtcctgaagagttatctgctagctgaaggacaagctgggaaagaacatgacacacctgcccttaagagttcataacaatgatatgattatgaatttggcatgcttggcaaactgtcataccaacactcaggatatggagacagggggatggccaggacaccaaaaataaatgaaggaataaaaatatgattataaaaaaggggg

SEQ ID NO: 2242 - DNA, 281 bp, Homo sapiens
  misc_feature (1)...(281): n = A,T,C or G
ggaaatgacccctaccttttttgaaacaggaatatanggaaggannngcacgtaagtagggaggcagaaaaaggaggaaggaggcacncaggtaggaaggcggaacgcagatgantgatgactnccacttctgggaaacaaagaagtggnggntaccccngtggtaccagacacantaacttttttgctggtgtcttgaanattaaaatccattcttcattctctgntgntttctctacggcatttgaaataaaatttctcattctgcctagccctacatt

SEQ ID NO: 2243 - DNA, 175 bp, Homo sapiens
  misc_feature (1)...(175): n = A,T,C or G
ccctggctggcctggnnnctcactatgtcaattctgcactagtttgaaactcactgtgggagtaccaggcctagcctcaaactcacagtatatccgcctgnagttctgctgcccaagagctggaattaagtgcatcatcctaccctgcagacctgctatcttgtttattcagtgg

SEQ ID NO: 2244 - DNA, 692 bp, Homo sapiens
  misc_feature (1)...(692): n = A,T,C or G
cacagttggctgcggcctncccttcgggggccccgnnggacttacagncagtaggnctttgccttctgtatgggacgttagggaccattcgctagnaaaccagcaagtncgggagnaagggttcattattncaagaatccccccgagnantgcacaagggaacagncgggccccgnagcacacttcttggcgnaggagcgcttacctgccgcagaccttccttagtcacatgggtgggggcaccccttgtgnagtttcacgcctgcacgnanagggtgtgcatgtgacncggcccagtttgggagcccacagnaccttgggatggtggccaaactttcttacgtttcccaactgccagnacttcccattaggtgtacaggcccgagggcccctgcttttcgatgtaagtggacattaatttnccttattttccttttcaagctgtaaaaactgtctgccattttttcctgtgggcattgccacagtagccccacgcccttctgactatttccttggggacattagagttcttcagcggcctttcctgggactttccaaagcaatcttccaaacaaacttctggcttttggaacttcagnaggaacttccaaacccagatactgcctgggtgcaggatgcaaataacccctgggtctgaaagaaggtggggaaagnatcattaaaacttcaag

SEQ ID NO: 2245 - DNA, 684 bp, Homo sapiens
  misc_feature (1)...(684): n = A,T,C or G
ctctggctattggaggggcgagacatnnctccnaaaggggttcngggnantagtgcnnaagtcganannttgtcgcgctacagagcataactgacaacngagcncgggncctcggggnacggnacattctctacaaaggggttaggnanaggccctggcngncnccggacnccgncnacacngaacgtcgatgcacacacnacaagannaccacagtgnacaacatcgtctgtggncncnccagacgacctcgcgccaagggncaacaacgccnggtnacnacacagtgcancacacgtggcaggacnggccctggcaacacgccatcacggaggnacaccgcacgntacccgccncgctatacacggnacgaagncgcgccgcggtgcagagtatgttnacaccgccgcggttcaaaaatgtatgtgccaccgactcctnncccngctgggacggtacgggacggacgcacgcacgccgtgcagnattccaccggtcactgcgcgncgcccacagtgtacgtctaccccacganaaggcacacactnttagtnttgtcgggacgacccntggntcaanaatgttctntgntcattncccaacaggnacntgnacggaacnaggactntcacaaggntgcgcgtgntctgcnngaggctcgttcaggnacggagcgatttcttc

SEQ ID NO: 2246 - DNA, 656 bp, Homo sapiens
  misc_feature (1)...(656): n = A,T,C or G
atcagctgtgtaagtgacgtcagcgtcatggnactgtcaagatcggnannanagcgcccagnaaaacagnactcacaggtcctttcaggnaaccagacggnactcccagnaggccggaggtgaagatggactctctgaaagcttccagcttctgcaggtggatgtggagtacgagcgcccagaagagaccagccctgcaaacagtgccgtgtggagctcgnnangcgctgcgtgaaagctcagtcnntgctgngngcttgtcnngntggctnncncnnagatctntgctctaagngangatntangagcctgacgatgcaatgctatcnntttaattgcctctggcatnacagctcacctcttcncttttgatgaatgcctnatgccaataagaatctttngganaccaaacactcaggaccaagactatgtgttgacttgagcatgacccagcacatgtcaaagaaggaattgagtaggttggcgggacagattcgaaggttgtatggttcgaacaaaaaagccagcaggcccttttggatctgccttactggattctcaactgccagccccctctatgaggagtgtctgaggatgaacgacgggttttctgcttacttgctggatgtgacagaagaagactgctttagccttta

SEQ ID NO: 2247 - DNA, 651 bp, Homo sapiens
  misc_feature (1)...(651): n = A,T,C or G
ctgaggtggggtctttnccctgacttggaatgctctgcggtgggatgccttggaggccccagctctgtcttcgccagcatgtaagtgaccctgagaatctgacttgagtatttcttggaaaacagcttaaagagctgaaggaaatgctttgtttaaatgacatctgtcagaagggaggagccaggcttgagttccgaattagatatgtaaattgggcgtgcagagtatcctagtccttgagagacctgggtcgaggaagcatcccggttggcctgagagtcacacgtgctgcgtgtgcatgttagagggtttgctgggaactacacgaacatttttctcgctcctacatcacatagccgtatcttccaggtagaatgatagacgcttttttcctgctatagcttcaaaaatgatcttggctgagtagcctgccttggtcctaaggcccttgtggcaaatgcctttgggttagtgttcccatttgctcatccctgaaccatgttgggccaggacaaagttctcacctccccgtagggaggcatgtgtggttttgaaaatgatgtttgtgtggtggggatttttcagnaagccaggccacctccccatctgcatttctgttggggggtggggggccggttggtttagaaggga

SEQ ID NO: 2248 - DNA, 651 bp, Homo sapiens
  misc_feature (1)...(651): n = A,T,C or G
cactaaacccacctacacctggcacatgtcatgtcacagnaccttcaangaccanacagtgctgcagcgtggnaccaggtncacaaacaccttcggactcatgaagccacggtggggcttntccgggntctccctgtgccttggttctttgcagcccaagtgtaaggcagagccaaggntgggtggtcacatatgtccaggttgcccacacaaccantactgtcactggngtagctagtaggaaattgngcacctgtttgagctnatagtatcgcanaagaccaacattccagtanacatcctgaatatagttgtatattagaggaaggtcccaggagcaccatgggggtgcattttctcctgcaagccggtagcctttgtcggcagctagctgcagcaagggctcagggatggagggggctgagcctggtgagcagaactggatgtaggcacgatactgaaagagggcgaagggaaggctgactatgagcaccgacaagcacacagaggccatcagcttcacgaggggcttccaggggctcagcaccgccagagaggaacaaaagcctctgcactgggagtgcaggaggaagccaaggctcaccagcccattggagcgcaccccagcagcaagagcaaagagcagcccat

SEQ ID NO: 2249 - DNA, 649 bp, Homo sapiens
  misc_feature (1)...(649): n = A,T,C or G
agtgaccgctggcggcngcaggactcntattnactttggttgtnggaaactnctntagcaggnatcttnaacnnggnncccanggncntcgtggtngcatcacgctagaagggagacacanaacaangggnnannntgttagtgactnggtnnacancancatttatgttntngggcgaggaaacttntgnngtgnnccacatcaccacctctgnctttgcatcannttgganccggtccacaaacnncatnncatantcntangagctcngtgangcaccancacttacancntgaggacagatcnnngtntgngccttnnantgntccaaagangcatgnagacatntctcgtggaatcttttccacagctctacaaggggtggtgtgatcattccatttttaccaaggaagacgggaaggctctgaatggttcgatcactttggcaggatgaccctgtgagaaggatctgaactctggccaggcctctgcctcttcctgatctgtgtagggagaccatcaattcgctcccttgtagaacaggggctggggagaggggccgggtcgtcccttactcactcggtgcttgaacttgttggaattcttattctccttcttgntcaggtcaataaaataatgggtgaccct

SEQ ID NO: 2250 - DNA, 644 bp, Homo sapiens
  misc_feature (1)...(644): n = A,T,C or G
agcgggaacattcaaggtncacccttagtgtttggaggcattattagnaccaggnacccttggagggacattacccttggnacaaaaggcaccttccaccggggcctgccggttggaggaccatttaagggattctaatggcgttcagttttcttaaggcggcctggnatttttctttcatggcaaactggcattgttcacccggggaccttggaagnccaggaaaacattttcttagnggacaagtaatgggaccgtcaagctggctgactttggcctcagactagnaatactacagctacccaggatgggccctccacgcctgtggnggttacgcctcctggtaccgagactcctgaagttnttttgcagtctacatacgcaacacccgtggnacatgtgggagcgttggctgtatctttgcagaanaatgttccgtcggaagacctctctttntgtggaaactctgtaagccgacccagctgggggaaaaactttgatgctcattggatngcctccagaaaaaaaaactggcctcgagnaggaatctttaccttcgaggagcctttgnccccaaaagggnctcggccagtgcagtcagnggnggccagaanatggnaggagtctgggagcgcaccttcctc

SEQ ID NO: 2251 - DNA, 643 bp, Homo sapiens
  misc_feature (1)...(643): n = A,T,C or G
ctgcacttgacgactacgccagacngcaagagctcttnttacttncgaacatgngggcccttggtaaattgnnaacctctcacgagctatntagaagagaccttgctttgggtnatgtncganctgggnggaaaaacaggngnnncgnaatgctntttagngctatcaggntttaaanctnaaagnnntaaatgtattccctgggtaggcaaatggcctaaggggatagactcctctccaacccctggatggaggttcaagactagcttccattgctcgctctgttgacagncatggggaaaaccacaaattaatagactcctttaattcaactcagttttgtccccgaaagggtccacctgaaagcaagcacccaatctgtcacttgaacagtgtttatatctgttgctgggataccgaaggctcttttgagcagttggctaanaggggcaccatgcctctgaccttggtcacctgcacacacagcgaataatggccaaaatgttaggaaagcacctccaaacatttcgagtgtaacacaaggcatccccaaattgcagcatccggtatttgttgtttaaataaatttcaacctgcatacagaagtgcacattacacataataggactaggctttgaaaagg

SEQ ID NO: 2252 - DNA, 643 bp, Homo sapiens
  misc_feature (1)...(643): n = A,T,C or G
agcctgttcctccacccttacttctgtantnnctgccttcttcangacagccctgtttcttctaccagtgcccaaacaaaagctactcaagtcctgatgctgacaagggccctgaggaggaggagaacaaggtccttgccaggaagcanaaaatgcggnctgtgttctctcaggcccagctgtgtgcactcaaggacaggtttcagaagcagaagtacctcancctccancagatgcanganctntnctccattctgaacctgagctataagcaggttaagacctggtttcaaaaccaaaggatgaagtgcaagcggtggcagaaaaaccagnggttgaagactagcnatggtctgattcanaagggctcagcaccagnggagnatcccagcatccattgcagctatccccagggctatctggtgaacncatctggaagcctttccatgtggggcagccngacttgnaccaacccancttggagcagccagacntggaccaacccancttggaacaaccagacctggaccaacccaacttggagcagccangcctggaccgcttantcctgggncgggcagccttggaatgctgctccgctccataacttngggggaggacnttctgcggccttacgtaacag

SEQ ID NO: 2253 - DNA, 638 bp, Homo sapiens
  misc_feature (1)...(638): n = A,T,C or G
agtgtgtgtgcaggccggnangggnagttcccctgcagaaaaattgacaggaactcctgtctcctagctgcctagatattgtcacccttggcatgctggaagttggaatcccaggactgaccataccccctgacctttgctgccatagcttgttagacctagttgtgctgactgaaaagcctgagggcagccagcatggcaagaggagcagaggttcccaggggctgccaggggcttgctgctgattggccctgccctccattgtcctaggcagggtgccaggaagctggaactttgttatctgggtaattagcttcagaccctggactgaggccgccaggtcttagggctacttcccacaggctgtgcaccctgaccccaagagggaggcgaggcgctgtgtacagaagccctgccagctgaacacttgaggtgtctgtcctacctggggaacgactgcaggcatccccacttacacaccttcctccccaccccatgccacactgccctgcctggctgggctctgccccttagggcagctgggcctggttacagtgtgggacctcccatctcagccttgccagggacagagggcaccaagtcttanaaaggtgatgcccccaagggtgcccgtccag

SEQ ID NO: 2254 - DNA, 636 bp, Homo sapiens
  misc_feature (1)...(636): n = A,T,C or G
agtggtacacctgtacncggcntatgcttcatttttttgctagacggtaaacccttgnncaatgaagcacaccggcngtaatatatcagaaccttgctgtgccaaggccccgtggtaactcacaagggggaagaaaaggaacaaaaggcatctatccttatttaatgatgttttggttgtgtctaataacctgtgagtatgtgcaacatgcatcccttagtatgacgggctacacttgaattaggctttttttggtacaaaacataaaatatgttcttttacttcttctttttcttttaaagattagacttatttcattacttcctgatcacaacttctttttcctttcatttggttgatgtttggtggacactcctctacacatttctcaattttctcaaaaatttctcaagttttagacacattttaaaaaaatgaattaaggtgctatcctgctatttgaatctgnggaaagaataacaacaaacttgaaaaggaggcagatgtgcaagcacatgccagtaattcaagcattgttaaagctgacttatgaggactgaaactttgaaagctatgtggactatacagtgagatatgttctcaaaataaaatatttaaaatatgagaaaaaaaaaa

SEQ ID NO: 2255 - DNA, 630 bp, Homo sapiens
  misc_feature (1)...(630): n = A,T,C or G
gtcgaccgtgtagagctggcagtagaggctgtgttgcagccaccgcaagnacagcctgactgtgcccagcctggacagcaccctccaacagctggccctccacttgctagggggaagtatgaactcagcggtcggacatgttccatccccagggccagacaccttggagatgataaatgaagtggaacctcctgcctctcttgctggggccgggcctgagcccagcccgaagcagcccgtggctgaggggctcctcacagccctgcaacccttcctgtcagaggcactggtcagccaggttggggcctgctaccagttcaatgtcatcttgcccagtggcacccagagtatctacttcctggaccttactacaggacaagggccgcgtgggacatggagagcctgatggcatccctgacgtggtggtggagatggctgaagcanacttgcaggccttggttgagcaaaaaaacttcggcccttaggggcctanatganttgggcggctggaaggggaagggtgacctgggccggggcatgaagctggaggctgtacttcaaggcctttgaagtaagccggggttgggtgttccttaaaacacctaagccctggaacctggggccaagttg

SEQ ID NO: 2256 - DNA, 628 bp, Homo sapiens
  misc_feature (1)...(628): n = A,T,C or G
acctgaggagcgttcctgtttggnattgcgcctagnttctacgcntctgnntgtcgangnnanaancngccgnaggtacatacangcataccactgtgacattgcatnganaacagctnaagatacngagaagcaanccttangcaagggatttacntggntttattgtcganaacacaagtataactgcacataactcggaagctgatttanacnaaagntttactnagcatgaactggagccctcatctccccgactagnaagannagtcgcaaaggangaccgngaanaactaaccttaaaggcttgccagangacagcaggtccacatcctcccatggaacagatganatggaaagtagctcctaccnagatcggncttnncncantancannnttantgataccctgcctanttgnnnntnntntnatgntnnggaggacnaanacggngcgagagggaaatatgcntatatttatctgccaagaaggcagccgcacattacaagtgcatgtttgttttcttctggcactgttcagctcacaacaacatcaagagcagaatttggagatttcgatattaaaactgtacttcaggagattaagcgaggaaaaaggatgaaatgt

SEQ ID NO: 2257 - DNA, 623 bp, Homo sapiens
  misc_feature (1)...(623): n = A,T,C or G
attagccgaggcatgggacaacacantcacnaagcctgcagcatgcgcttatgcngtcgcncaccanactagnnntctcgactcattnnancatgtnctctnggactgtngatatnttcganagnggaccttgaagggacattctgctngtactttggcttgnatacccactgcntagttggaatcacacttaacctggantagcacaggaccgccgggtttccctgtctagaacctgacccattctcctgcacccagcactgttttctagcttgcaggatactgggcttcaaccttctcccacccttncagntttggattnttgcanntncacaggncagcacccttcacttttctgcccccctacttcagcactgganctgcttagtacattcagnaacaggactcttttctnagnctgactttctgaagctcttaaactgcactacagccttttaaacttgncattcacttcttgnaaaccatataactataggntatacagattctgtaatgaatatataaangattaatataaggctgggnngatatgnaatttaatattagtaattaataattngggaataaaagagcttgcattgggactcaaaccaaacccttac

SEQ ID NO: 2258 - DNA, 619 bp, Homo sapiens
  misc_feature (1)...(619): n = A,T,C or G
gacacagctttgggctgcaaaattgagtcaacanangcataaccaaccccagtgtggggtcatcacgcttttcattcagcgttggaaggaatgcaaattatgtcatctgcaggggaaacggnatggtaactaaagtatacactgttaacaacaaggcaaaacaagccaagcaaacaaacngtacttccaaggcagnatatggtttctagcctgcaatcctcagcacttgggtaaccagtaaggnaggctcagtaagttcaagggacagcttcgcgctttaagntnagttnaaggccacacttganangngtaaggnagcngnccctaccccgtccgcaacacacacacaagcacacctaaactgacatataggtttctctcctgggcagantacatatataatgacagtganaagaggtgntntatgangggaggcaggacctaaagcggggcggggcaagagatantttctnncatngggaaaacaaatatggacgttgntctctcacatgtganacctagattnantttctgtgngtgcacaggacacggaagcanaaaggcaaaagttcgtgtgnaggaagaggacanattggaggagggagaagaatgagagcat

SEQ ID NO: 2259 - DNA, 615 bp, Homo sapiens
  misc_feature (1)...(615): n = A,T,C or G
ctgccgctatgtttcagcnncgggaaactgtaatgtagcttttggctcgaaggnaggaggaatggcgagtcctccaggcccaccgtgcgcagctgcaggtaggcagctctacaggctgctcaaaaccgcctggaggagacacaggggaagctgcaacgcctacaggaggactttgtttacaaccttcaggtgctggaagagcgggaccgggagctggagcgctatgatgttgagttcacccaggcccgccagcgggaggaggcccaacaagcagaggccagtgagctcaagatagaggtggccaagctgaaacaagacctcaccagggaggccaggcgagtgggggagctgcagcatcagcatcagctaatgctgcaggagcatcgcttggagttggagcgcgtccacagtgacaagaacagcgaactggcccaccagcgggaacagaatgagcgcctggagtgggaactggagcgaaaactgaaggaactcgatggtgaacttgctctgcagagacaggccntncnncagttnaatnaanccattagggtcatgatgtngacaccangataagatccncgaatcttacagnctagagcccactacttactgatt

SEQ ID NO: 2260 - DNA, 608 bp, Homo sapiens
  misc_feature (1)...(608): n = A,T,C or G
gactaattctctaacantgtcccaaganaccanntctccncngatttgnggcaggccatantctnntngcttaacccttannnncnacgggcccnntngaatgatacgnttacacgagcnnagnttgtggatgatatncatacacttncaangacttgtcctttgntcaannntagngcnngnancctttacgaagatggaatgccngggatnaaccactgactnccctgaaattcctgctgcctgcagagatgacgactgctgtcctcctagctggccactctgaaccgtacttgcttgtgcagacatggatcctgtaccactagtgttcatactgccaaagggnggaaacgaaggcagtttatttgatgatactccactactcagactggaagatgatgaagatgaagttgtggtcaaagttgaattagctgtggcaactgaagagatatggggnacacctgaagtcattgtcatagtgctactttgccgcaaatgcnaagggggnagatggagcattagngttttncagtattttggnattttgaggtgnnagnaaccnaaanactgatttggnngggggcaacnaaattttggcttgggagagc

SEQ ID NO: 2261 - DNA, 606 bp, Homo sapiens
  misc_feature (1)...(606): n = A,T,C or G
agaaagagttgccgttcgtttcctggagatgctcaggcatctcggtgtaagcatcttctagctgtttttgatggactctgcaaacccaaacacagtactttggcctcgccatggcttggtggtcctcttcacgtgactggagccagcctccctgcctttaggcgctccagccttccccctgaggaggaggagcttcacaggccccttcttggggctcgggttggggttcttcttctccagtgctctctgctgcctgagccacctccttctccatgtggctctcaccattgatgctgcccattgtacctgtcacctctctccgaagtgccttgagcagccactccctccctccttccatctgccccaccctctttgctcttactctccttttcccacccataggctgggcccattcttgctctttctctgccctggcaactgttcactttccttatcatcgtccctgcggtttgctgcctctgtctcagtcacccaagcccttctgttagcttcccacctccacattcctgcttccagctcctcccctctcaagnaaactctgccctccatagctcctggctccggggtcttgctcacccgctttca

SEQ ID NO: 2262 - DNA, 604 bp, Homo sapiens
  misc_feature (1)...(604): n = A,T,C or G
tgtttggtagctgacaactctgtaactgtagcttggagnaatgcctgnaagnaagnataataaaatcgaccatttcataatggaatacaggaaaacgaactttgatggactcccacgtgttaaggatgagcgatgttgggaggtgattgataatatcaagggcactgaatatacattatcaggcttaaaatttgattcaaagtatatgaatttccgagtgagagcatgcaacaaagctgtggctggagactactctgacccagtgaccctagagaccagagcacttaacttcagtctagataactcatcatcccatttgaatttgaaagttgaagattcctgtgtagaatgggaccccactggaggaaaaggccaagaaagtaaaatcaaagggaaggagaacaagggcagaagtggtactccatccccaaaacggacgtctgtaggctccaggccaccagcagtaagaggcagcagagaccgttttactggggagtcatacacagtgctaggagacactgctattgaaaatggacaacattattgggaagtaaaggcccanaangattgtaaatcctatagtgngggtgtagcatataaaact

SEQ ID NO: 2263 - DNA, 601 bp, Homo sapiens
  misc_feature (1)...(601): n = A,T,C or G
agggagaggcgagggcctggttggaagagacaaagcctcatattctatgattctatgtgacagacaaggcctcctcaccagcaacctgcagcccccaaggagcgatggtgacgatttcagccttcagagcagcttgaatcaaaacaaacgaccaattggcaggaatctgctacccagaatgcatcactgggttctcagcagggagccaaggtctcccggccaattccctccttcctcaagcaagcattccctcaaggacactccctctctctgcctgaactagcaccctcactgtcttgctgtcttctttttattctccataaccctggactcaacaaagctccactgcagaccctacctttagccccacacctcctanancnntntaangacaggctnctcgggtcaagcncagcctggagnctgattggataagccagnctgnaggctgantgnanaagccagcctggagtctgantggataacacctgaacggctccctccagactctgnnggctncccgnttgnttgtgactcaattaaatnaacaaactgnttnccctgcccaganganacttgntagatcccagctgcaggtcct

SEQ ID NO: 2264 - DNA, 599 bp, Homo sapiens
  misc_feature (1)...(599): n = A,T,C or G
cctgtctgtgcaccgtggtttggagttatctattaggagtctggtgggctcattacagggtacaaaactggtaggcaatgtgcccctcccaccaagtaaatggncaatcttctattanngaagcatggagtctctccccactttgaactgtcttactattttgcagggacaccatcatgcttagagggccattttctcttattcttgctaatggngaagtacttaaaaacaaaaccaaccagtcaaacagacccttaaggcattaaagaagaatggcttgagatgacaccctttgaactctgggaagatgagtgagaccatcttgagactgggctataagggactgttactgccacagcctgttgagaagatcacagagctctgaggaanaacgaatctggcagtaaaataaagatgaaggtttgcaanagcctcaaagatntcttagatccacacctatnnctcataacttgtttctgnggaaggagagcnttggacnagaganaaaaaggntccctcatacccntncnggnntttttcccttancgtgggnannnnataggggggntataantttctnacaagcagaaaacacctaa

SEQ ID NO: 2265 - DNA, 598 bp, Homo sapiens
  misc_feature (1)...(598): n = A,T,C or G
actagggtactctggggcctnagnaccctgcatgnacaggaaggtctncctgtngcccatgnacnatcaggntgtactgtngccacgctatcctggntccctatntgactgtnacgancnngcctgncttnttccaaggttnaagaggccacagggctnggnccaccntaatntgtancacaagtgactncnagggatggccggctgctctcaactgngatccgggcttnggattnacanagtgacngncccttntgccgaatntgccaanagggancaaatggngagaacttgntgtccccatgnggctgcacggncacactgggagctgcgcacaagagctgcctggagaaaaggctgncttcctccaacaccanctactgtnagctgtgtcncactgantttgcagnggaaaagngncccccgacctntcncagaanggctaaaggacccagggccgcccactgagaagcgaacnctgngctgtgacatgggatgctgngngntcatcacaccactggctgccatctcaggntggctttncctgcgaggggcccaggaccacctncgtctgcatagcccggctggaagctgtagg

SEQ ID NO: 2266 - DNA, 595 bp, Homo sapiens
  misc_feature (1)...(595): n = A,T,C or G
gtgcctgcgccttggatctnttggcgntagcncgtatnacatantnggggaaaacttnagctgtgncttggttngctgngagcntngnttcacnttnacnncctgagancgacnncnntnaggggctntaccnnntgactggnctctgagcgangggctgctccatnagcgccctnaacaaaccgngcnaangaagcnngatngnctcggagcgtntttgatgataaaaatcctacangcaaggaanaaaaagttatcaacctnaacccnnaaggcnaagtatgacatgctgggaactgaggaagtgaagaaagatgtggaagcaaggacagaggtccagtctttaaaaggagatgctgagattaagcctctgaggctgtcatcanagagggactnccctggagctncacaggctgggacgatgaagtttctacaaacagccganaacattctgcctctggaaacaactcaggagctaccaccaaaagaagcaatgggaaagggtgcacagccccagattctagaaccaattcccaaagagaacagctctccanaaatagaagggatncaatctgcanaaagcagcggacaggca

SEQ ID NO: 2267 - DNA, 591 bp, Homo sapiens
  misc_feature (1)...(591): n = A,T,C or G
cagtgcctgcatagccttgtggaaggggctcatggagcagagctggncatgggcttccatgagtgttnctggttgctaggcgtaagganntctaancactcntcgtaagtcctngaantnatgccaaactntactantgccctnacaatctccnntgagactacaagcgcgnagccatgnnccgggcncatgatgccatatngagcccancagtggngaancacacttatccagagacactacagngntatacncttaccactgaaggattagacagnggatgcagagacatgccttcngngntcctagggcccacattctatgcctaatacccaantcctcagtaagatttcttgagtgaatgagtgaatgaagnagattaangacagcaacnanctaatgncttttgattgacatntcaatatacatcctgaaaagatactctctcctacacttgtacgtaattccncaacacagaattatatatttatcaattgatagaaaaattcataagaaattagangcacaggggaacccccttncaacaatgaccttcatgatctgaagnttcctaagaaagataaaagcttc

SEQ ID NO: 2268 - DNA, 589 bp, Homo sapiens
  misc_feature (1)...(589): n = A,T,C or G
gctgagggaggcagcgcatgaatgcagtaagnagctcgatgttacagggatgaggccatgcgtagtacttgcttcctgaggaggaggactgctaggacagaacctggctgtcagcccagtctctgcaagtgttttctgcactgactgtttctttgcacttcagcagccatccgcttactgntacgttgaaatataatacagtctgaagcttnttaggcaccacacaagaaacacttgttgtttctgatgctttaatgcagaaacaagcagcttagctgcaaaatatccaaaaccaggagaattagccctgagaattagcaatgttcggatgtgctgcagtgactcactatgtgctgctgtgacacactatgtgctggatgccaaagcaggtttgctgtctgagcccataagggttccatctgtctctgttaggctggcccaacagcttctatgggcaggtgagttaggaaggactaatcacagagattcctgactgactctgaaatccatgtgttgtgttgaccacanngagaagaaggataaggtagaattactgtgtactcattaatgaactttaaagaaaataaaa

SEQ ID NO: 2269 - DNA, 574 bp, Homo sapiens
  misc_feature (1)...(574): n = A,T,C or G
gggctttgactgactggagggtggcccaaaccaacnncacgncacctagacctgcgggangtaaanggtcttaccatgcgggacaccttttccgtctctaatgtgtgtatgcagggaactgctnngacagcntggcgcngtggccacaggataggcntccggggctnccttccagggantttgggatccctnacaggncncatggangagcacaggggcttctcgtgaaggtcctggantnaagactgtttgggatgagnggcactggtccccctgnatggcagaaggtcanngcagaacaatggggggccnaagcctctttatntgcatgctttgccatgagtagggcctctgctatcctgacctatacccccaggnaacagggtacaccgncnnatngacggggnctcacncntantnnggcttatggcagatnntaccngggctnccaaagcctnanngcggtgggnctgcttatcttgtggangtctcnccntgccgtgnnnntctgttctngtcagcncacancctncctnagcanggtagngtggtggtttgagatgcttgcggagct

SEQ ID NO: 2270 - DNA, 572 bp, Homo sapiens
  misc_feature (1)...(572): n = A,T,C or G
ctgctaagcacacgcgaaaggacacgtgatgaaggattctttgctaacgacacacatgcattgtgtccaccttgcattgcgtagttgagctgcatttgttgagactccatagagagaaaccgagccaaaaaacttctggtggtgtgctgcagtttcttgccacttcctcggacttgggctgattggcaaagtgatgtcagctgagacaggtgcacatgttgaggcaagacccatggaagactcctgatgcttggagggaataaatagaacttaatggacatgggtaaaggctgagcttggcttgcttatagagctagctgtgcaacgcgtgtgggtcttgcgtcttctctgatcttggataccttgagagaggcacagctgaggacttctccttgttccttttgnccctggtccctcctgctgattccagcagaggctgaggcctggctgtctctactaagtagtgccaccatggctgatttgtgtttgctatcctgactctaccgaactggaactgtatctatcaagtgtttgcgaatggatccaagctgctgctgctaacctatgaactg

SEQ ID NO: 2271 - DNA, 310 bp, Homo sapiens
  misc_feature (1)...(310): n = A,T,C or G
gcacgctgtatgtctcagatcacaagatgttgcggaangncctagtgcacttgcttactctggttagnnanaacatgtcaaacttgacacagngctantagtcaactggagagttgcctaggtaagantggncctgtggttgngnctgtannggactgncttnagttggtngattcatgcanaaggacctatnncantgganggcccagncatccctacatgnggtnctaaactgngtagnaaagctagcgggtataagctgggctgngagacagncagcagcatcttccatggagtcttgctctatatt

SEQ ID NO: 2272 - DNA, 568 bp, Homo sapiens
  misc_feature (1)...(568): n = A,T,C or G
agctctgccaacttgttccctgcacaacannagccagtaaggcacccttcccatagcctggggcttggcaccagctgctcagtctgcctcctcctccagcaaagccttcctagggggctcactcacaangggcgtccacttctntttcctgggaggatgtcccancctgtcccattctgaggaactgttgcatgcatagctgtctgacggtgtcttcacaaactcacaaatacctcctccccactacaaaaaacctgttggctagccgcggcacacccctttaatccctccattgggaggcagaggcaagtggatctctgtgagcctgatctacagggcaagtcccagggtagccaagacatggagaaattctgncatgtactcgccctctgccgcaacagnnagttggccctaagcccctgccaacctccccaccccaccccanggaggggnggaaccctgcctacatcccnccaatttgaccaaatactgcccggntttgggctncganccttncccctttttgcatcctttaanaaangcccctgagctagggcaccctggatcc

SEQ ID NO: 2273 - DNA, 567 bp, Homo sapiens
tgctcttcatttacctattgatgcctcccaaaaagagacgcagacagtcccagaaagcccagctgctgttccaccaacagccactggagggccccaaacaccactatgaatcttgccagcagcccattacccacactgttcaggtgcccagcaagcccattgatcagagcaccgtcacttcctgggtgtcaccccagtttgatagagcagcggaaagccggtttctgatacactggaagcctcaccgagaccaggcaaggcgcccaactcggagatctacctgcaagtttccacgtctaacctttgagagtccacagtcttccagttcagagacgttgttgctatccaaccgagtgcagccccagaactcagaaaaggacccacccagaaggcctttagtgccattgttcagtccccagagctgtggagaactgtcagtgcatgtacctcacagtttacctcatgtgttcgcaccccctgacatccagaccccagactcttctgtaagagacgatcccatttccccagaccagaaggaaaacagttttccaagctgcatccttgatg

SEQ ID NO: 2274 - DNA, 562 bp, Homo sapiens
agccagcacacagcaagggctacaagtagtatttgttagtggaactactttgtgtgcctaaagataagctgagaagttaagagtcagagcacgagggaaacctacatttagtaaaatgatctagccactttgggaaatccacagctgcccaaaaagctaaacacagagttacgtatggatcggtaatgtcactcagaggtgtcacccaagagaatggaagcgtgtctgttccacaagagcagaaagggccatgctagtgcaggccattatggtggccacaagaggaacccaaccaaaccaatgcctacctgctagcagagccccgtgggccaggtgcctaggaggtagagcaggaggatcaggagttccaggccttcttcagatacatagtgagtctgaaggacgcctgagtttggtccctggaactaattaatccctcatggaagaaggagagaaccaactcttgcaaactgatctcatttccatatgtgcatgcctgccccccaaataaattaatgttttaaaaggacaaatgtccagcaatttgatttaaaaaaaaaaa

SEQ ID NO: 2275 - DNA, 561 bp, Homo sapiens
  misc_feature (1)...(561): n = A,T,C or G
gactccacctgcacanttngcctaccngtacntactgcttncatgactgnncatagcactgntatccccggaaaaccctgancanantgtgntgctgtcggntgnttctgtncatggnagganaaaggtaactatacacaggcctaggtaanttccctagtcctgctggcatactgtgctatcatagcacagggcactgatnancaggtggtccctgtgtgggtggngcctgatnctcctgnntgctggnagactatntcctcttnacttggccaacagcagnagntggttcaggaaaggtctgaaggcctgatgatccacagganctgnggaaggttacataaatgngctccgtccgntgtgtgccttacaacacacgaggcacataacccaatagggngtncttgnaaaagagcagagnncatcaaaagaagcagctctncttctcaagggactaananctatggnntactctgcagcaagtacanangaccncagttgcanagagcgccctccaganntcccccagaaacnaggnttccaacatgggaaacagtgtgc

SEQ ID NO: 2276 - DNA, 553 bp, Homo sapiens
  misc_feature (1)...(553): n = A,T,C or G
actgttgcttgctggnaaacccgcctgtttccctcccctgnaccaattcgctccactcacacaaccaccagccatttgctctgctttgccaggcccaggagggtgaagagacaaaccagaagcaccaagagcagcaggaggacataggccagccacctgcaggaagaaggaccaagaagacagtgagcctcaggaggctatcagcacccccaagtcaccccaacccaatctggtcctgtgacctccctgctgcccggtgacatggtacatggtttcacaagaccctggagcgctctgcagcatgggtgtggaactgaagcacctggtaactaccctgaccacttcacatacaagttctgtgcttatgggcacagttgtcagcctctgaatcggattccccaactgttanggtgtcagtcacctgtgacctaattgaatatttcanaggtatgggngcatangtcttnaactacttcagttagnccttgtaacctggttggcctaagntttcctaccagtaacatgaagggcttataggatcaaccctcaaaat

SEQ ID NO: 2277 - DNA, 553 bp, Homo sapiens
  misc_feature (1)...(553): n = A,T,C or G
ggtgacactgtccccgcnactagtcnagnttgaccacngncacgaacccnatccaccagctggtggcctanctctgtgtccatngccagcganngcacacagannattttangtcccaggcaggtgcactantgatgcttnacgccatgcaaagcgcatanttcgcttccanntgagacnnggtttagcanccaccctcaactcaagaaaanctcattctcnntnaatttcggtaatncatagnataggnccatggtggaaaaagatncaagattactncttcccataggaaatatccacnagngggtgtaccaaccacacttgcaggggcaggccctatgctcaggcataattggctaaacacaanaatgatactcagctgcatggttttgctttgctnctgagctaccccctgccccaagacaggggtttctactgtgtagcccctggttgtccctggaacacttcttctgtagaccaggnctgtcctcgaactcacagagatctgtctgcttctgcttcccttaagtgtgagattaaagacacgcgtcac

SEQ ID NO: 2278 - DNA, 551 bp, Homo sapiens
  misc_feature (1)...(551): n = A,T,C or G
gtgcacgtcgtaacttttcctagantcctgtggntncacgccgcaggcactcccgacggtnataactntatnccgtgtnatgaatnactagttctctgagtacatggatganntacntnctcagcaactggcaanccctncactactgactgtggcgcgcacactacanggaacgacanngctgaatgnccaacctgtcnngtatccaacnacccnacacacttgngggcttttactagggcaangcncgggggcaggangggaaaaataagaaggnggaaggcatnatgccattntacaggagcantngcccaggtaaggagggacnagtacagtagcnaaaccagangacccactaccttaacttgcntggaatatgtatgtaatataagcctcatggcatagtcatgagaatagccctttagaatcctcagcnccagaacctgctgtagngggtnttccctnctttggggtgcagcnccacctccagtcttctggaagtgcttgggttacttggctaaataaactgcttaaactgtcaaaaaaaaaaa

SEQ ID NO: 2279 - DNA, 550 bp, Homo sapiens
  misc_feature (1)...(550): n = A,T,C or G
gccatgaaaggaaccancagctactgntcacgagccaaggtacgganancaaggggtgtggattttactctgtctcttcttggatggntcatctgcatgatgncttatgaanttggtaataaggaaangnccacaaactgacttcaagagaaaagctgtcctaggccaactcttntcacttcagggctggagtcaccatgaaagnggcagggcacatcagaagcaaggattccagaacagtcaataatcaggcagcaggtagagtgctccaagccaagtgcgtatggtctcttcttcccttgcagtagtgggttctgcacgcagagctttgaacacacctggcaggngcctggcactgagccaactgcttttgccacccaggacatgggaatggctacatcaagacggactttgcacccagataacagctagctttgattctactcggccaattgtctggagtgtagcactgggcaaatttactcaacttccctgataataagcttcctcttatgtaaattgggctatgaaaatccctactttattgaca

SEQ ID NO: 2280 - DNA, 549 bp, Homo sapiens
  misc_feature (1)...(549): n = A,T,C or G
gctgatagagacgggcanaaacctncgtcttgctttgnaccctgnacactcntntncangggncgggggctacantaaaggaanacctgantctnnccggactnnanntccttntatgaccctttttacccttgcngggaagnttagnttgcaccccctctnctgtgtgtacacaagtnaaacaaatgnactctgggtnggaaccnagtgganacntncnaggactcacaatgcgnttgatacntcaaccacctgnagtcaaggnngtaggggnaggacacanaaacgcctgcttctgtnccatctnccagccctgatcatgagcacaagggtggctgattcaagactcagctttatggtctggattcctcgccatccccacctccacacaagcctcgggtgaatcaggaggtcatatggcatccttatcttacgtaaggngacaggtctccctcttaaatataattctcagttccattntcagtctccatctctcctgttctccacaccccacaacactctaatgagctgcttcatgtcctgaaatat

SEQ ID NO: 2281 - DNA, 546 bp, Homo sapiens
  misc_feature (1)...(546): n = A,T,C or G
ccgttacggcccgcacacccacaggcgatgttcacancacngagtagcgcacacgtanaacgcggacgccgcggtcatagatgtctccgcnatccncacgggacggacggacggacggactncacaagagccggatcccangctagnntccaccggtcactggcggcgccatgacctaacagtggntcnntagnganncantnctgaactgggcnctcagtggcattnagnctgctgagttaccacntggtncagtatgggcggccggcttacagaaggagctacgatggcaccgtagccacgcttaagatgtgagctacttctgtggatatctgaaancnaagctgtgccatcgttanaacanatgttctggatcntanttaacngnggactgngggttcatgtagnggtggatgcctgtnnttctcgaagccaggttgacccggntggtggcactggcccggatganacagagtggancttttctcgccaccaacgaatcgntcattntgcagnttngtgagggatgccttccacccccagttt

SEQ ID NO: 2282 - DNA, 542 bp, Homo sapiens
  misc_feature (1)...(542): n = A,T,C or G
atggcgcggccgatccggtgaaaccggcagacagtgaaagccgtggaggtagggaccggaagctgttcgtgggtatgctcaacaagcagcagtcagaggaagacgtgctcaggctcttccagccctttggcgtcatagacgagtgcacagtgcttcgaggaccagatggcagcagcaaaggctgtgccttcgtgaagttttcttcccacacagaggcccaggctgccatccatgccttgcatggcagccagactatgccgggagcgtcctccagcctggtggtcaagtttgccgacacggataaagagcggacattgcggcgtatgcagcagatggttggccagctgggcatcctgacgccgtccctcaccctgcccttcagcccctacagtgcctacgcccaggctctccgagtcaaagctggaccttgatcctgtgctgcaccaggccctgtatcccacactgacctcggatctcaggntgagtcctaanagnctgatcgatctctgatnccagaatgaaccttaatcgaaaaaaaaaaa

SEQ ID NO: 2283 - DNA, 541 bp, Homo sapiens
  misc_feature (1)...(541): n = A,T,C or G
gcgagcccagctcagnacatggnaaatcagtatgcaagcccaggnagaactgcagggatcntcagcagntcanttcacgagaaatcancaacggcagntncatccagcangnacaccttgaagctccaccnatcagtgtgagttnacagganatggcnngaagctgccgggataacatcanagcttctntggtggtgtttccctctgcgtggtcaccacacaagatgcccagnacggaatggttgggnatactaggtgctncatntnnccgatatcnacaaaacagcnttctgttgtgtctcacttnaggtnaaaccgtncnctaatnntattatcttggaaagatnttgctntgcatgntctatggctccangccagactcaacctatggctgntnacagtcttactactnggncttaacncatancanataccnncctttctgggctncnncctctgtgaacttacttccanacagacgctnnnctttcttttagtacaccttgnctaacgaatgttttaggatgtctgtagcacaatg

SEQ ID NO: 2284 - DNA, 529 bp, Homo sapiens
  misc_feature (1)...(529): n = A,T,C or G
gtggactgtggaactttcaccttnagtagatgggctttgttggnattcttatcaaagggagctctcacagcagcngtgatgaaggtaaacctttcagcaccctggatctccatagggtaaaagcgaggtaagtacaatattgaagcattaccaaaatattaggaggaaatttgaggtaatgtattctcaaagaaaacgagtttacatcaaatacttgaaagttataggaaatctgagactcaagtaaataatccaaatttacaaatttgcttaatgtgaactgcattgaatttgaccattcagaattggggaatcccaactctgtactggaacgttgcacaatatcctgcaactttacactgtatgagacattttccaattctctcattatacagaaacttttcctttaaatatgaaattatttaatatattcttaggacttggaatataaaatacatgtctggggatatattgtgacncaccttcataaaattccattaaaaatattcatctatgtcgattccataaa

SEQ ID NO: 2285 - DNA, 528 bp, Homo sapiens
gcaagtcctctccgcctcagttttacttatgtgtcaagtggggtaacacactagttcccattccaaatgaaggtcaccagaattttaacacgtgtaaggagatggcccggctggctggatgccaagctagtcctggctcagaaaaccctttctgggtgtgctaactaggaccaccaccacagttacgacatttcataagaacccctggtttgcatagaactgtcagaggagtcctccaggttctcacagttaattcctttacgccttgaacccacataacgctgaatgtcagagtcctccatttgtgcccccgtgaccacttgctggcccacaggctggggcacacaccgccccgtgtggtctccgcccggccccaggacgacttttcccaaagctccgcccggtgttcatgacttcccccacccgccccggctcctgcctgcttgcaccgcctgcgccagtgtggtgagcccggtcctgccggtggcaccgaagatcgcgatcttcttgacagtcatactgcggggc

SEQ ID NO: 2286 - DNA, 522 bp, Homo sapiens
  misc_feature (1)...(522): n = A,T,C or G
atgaaacctggcactcaggcactcgngtgtgcaccntacncagggcccncctggncannngtangaccactctgcctgtancggccctctttctaacctngngcncttctgtcattncnnaactggcttcntggaaaagtnacnctngntagntcacaaagaancactntttgctttactttgggnaatncgtttctggggctactataaacctcaagttatagattgatcccccaccccggcccccagcccctancccaaattcagtttgtttccgatgacaagacaggatgttttcccagcttctcttgaagtcatgaatctcattttgaaaacttattatcatcgtgtgtgtgtttgtatgcctgtggatgagcgcataccacggagtgtgtatggaggccggaggccagattccaggagcgggttctgccccttccccagttaagttctaaagctccagctcgagcctcacnggccctgaagccgagcctgaacagtatgtgttacaaataaaacagg

SEQ ID NO: 2287 - DNA, 517 bp, Homo sapiens
  misc_feature (1)...(517): n = A,T,C or G
ttctgtcctgaggccntnactnntncttgctgaantntctaggtnagnccngangccnngntgagacnnaatacaagaatgggaaaggaccagccactgctagcttctgaccttcgaagcaaattacagtttccttgggctcggaaaccttttccagcacccttaccggcttctttgcggctccctcgctggaagcagcagccaaccaaccgancagcacaagtatgtacatgcagtgcctgtgaagtctgaaggcggcgttgaatcctctggaactggagttaacatgcaacgcggattctgggaaccactcagcaagtgcccttaacactggactacctatcctagantgtgaactctttcagcttcagcttccggagtagcggatcaccgccacatgcagcctggcttactgtttgttatttattattttanttatttttgaaattcttaggattcaacccatgggtctnatctatgctagangagtgctntgacactaatctatatccttagg

SEQ ID NO: 2288 - DNA, 515 bp, Homo sapiens
  misc_feature (1)...(515): n = A,T,C or G
cccctatgtttttggtcggacncttntaatgngcaccaagaaccntgttgcccaaactgcaattttnggtncgctncacccttanactctcanccnaccnngagtcataaaaatacttactttgctctctcancaactctttattgcanaccagacaacctgataggatgcncnctncagactatnaccggcagagcngtgcatgtagaagcgnaagnnagntatgattatttatcaaatnnttaaagtcatggnnngaggatngaannncangnagagatctgaacagtgtgctgcactttgagagctgctaccctgaaaagataactggactctaattcttcaattcttccaagaaataaagaacaacagatctatcataattcattttgtttacctccatcanggntttattnttaacnggtcttgntttcatgtttttatttttaaaaggncatatataaagatngcttatctttattaagacctntcctaataaactctttgattgaaag

SEQ ID NO: 2289 - DNA, 511 bp, Homo sapiens
  misc_feature (1)...(511): n = A,T,C or G
agtaaggaaagtgaaagaggcaacccaaactgtaagtatgaaaggctttccaatggggngacagganaattcttcagaaggnatgcagcaagctgtatgacggtccatgacaagtttttggcactgggaacacattatggcaaggtttatttacttgatgtccnggggaaacatcactcagaagtttgatgtangccctgngaagatnanccnnnttagcttgnatgacagcggagaacacntggcngnntgntcannggatgncnngntgcangtctttgggctgtattntggggangacnttccgagactnttgantgtgccattaaaaanntngttgngcacccncagntcgtgaganccacctgnnnncnacttgtgactgncgggaaaaagctgctgntgtnttgaacggacctggatgaacagaaggaagtcttctgtgcnacacgaaggggaaggaaacanaaagagtgtgaagtggagaggncatctgattgcttgggccaac

SEQ ID NO: 2290 - DNA, 510 bp, Homo sapiens
  misc_feature (1)...(510): n = A,T,C or G
cactggaaccagtaatttnntggtctcgttcgctggtgagaaaatggacnncactgttncaccctgcatgttcaccggaccttgaagacggaaatttcnangaanntaattacaanctttgntcttacactggaaccctgggaaaaagggacctaccaaccangnaanggagtgtgtgtctggtaaaaatacaccacagggggctgntaactttnaagggacgtggccnnnntcttntcactggnggtaatgggaatgngctgaantttgctcagaggtcattgnacatggnatnggatgttggnananttacaacaatgctgttgtgttgtggaaaatcattgcatacaccggcnaagaatgggtgcggccttgttatacacccacanctgngtacattgtagcatgatacacntgagatattcangaggaagaactnctnaatgggacaccgcttacnnttgtcatncntgaatgacctccngtgnacacnttacttgactaatcaca

SEQ ID NO: 2291 - DNA, 507 bp, Homo sapiens
  misc_feature (1)...(507): n = A,T,C or G
tgaggaagttgacttggatcctctctncaagtnagcagactccgataagtgctcctgtcaatcaacagcctaactttcccacctactgcccatccctgagggcgngctcnccctangcntggtgctcctgctgcccnacnangggccctgtggnctttntgnaaacncngnntgtataananntngncgcctcccanccgcgccttatcaactctttcnntatggcantactganctnttggaagtgaacagcagccgtngncgcctgagggaggatacttccagccaaaggctcaggaagtgtgaagacacttgagtagtgagaacagctgcttgtatctttcccaccggctttccggctggttctgtttcttttgaaacttccagttcatggtctgtggtttgtaagtcactgtcctggtaagagctaattttgtattgcagacatggctctttgtgttacacactttaagaatagtttaccacttgttttgattaaaaaaaaaa

SEQ ID NO: 2292 - DNA, 501 bp, Homo sapiens
  misc_feature (1)...(501): n = A,T,C or G
ctgcctttgggcccgnagggtcccagggngctgggctgcgtgnaggcgctggnatgttggnagcaaagcctcatcatgnaaattggnagattatgaaaacatctgaagtcatggtagccgcacacagnatggtaatatcaggctgtctgctcactcgggtttcatactccgtagcagagtatgaaaatggagaacgcacagcccagtccttgagtttctgccttacgaacacactgcgaacgagaaggcgatttgccgtttataacacttacgatttcttatgaatgaacaaggctccaggtgcctctgaggcatgtatggatgcttctttctgtaaggacttggaacacaaaacaggacagacctttgcgtccatttctcagctattcgtaatcctgtgattatgttctcggcttcaagatgaagcccaggcatttgttgaagtccagtgttacttcttcaagtgattgatcaaagagccctcccccactgattctctta

SEQ ID NO: 2293 - DNA, 497 bp, Homo sapiens
  misc_feature (1)...(497): n = A,T,C or G
tgaggaagatgagattgaacccttgctggngatnngtagcttgacaccnactccgctttggtggggaaagcaagcattaaaggaatctcagnntantntntgccnattgcacgnatgcctcggtgnccgctggcnaangctcacctgttnatnaaccgntccaacccgtnggctgacantgncagatacattcangattagccgnctcttatacccggggaagaacgggggacttggagacttcttcggagaccctggcaatgcgctccccgactgtaacccctctgggagtaaagatgggaaatacgagctgttgacagccgcaaacgaggtgatcgctgaggagatcaaggatctgatgaccaagagtgacatcaagggccaggatacggagacactactggnaggatccctggccaaagctctgngctacattcacagagngaacaaggcagntaangataatcaggagatgaaancaaggattttggggatca

SEQ ID NO: 2294 - DNA, 494 bp, Homo sapiens
  misc_feature (1)...(494): n = A,T,C or G
caacctcctacggtcaactagaaanacantagtcncctctgcattgcacggggaanagcanagacaatgtgcatggggacaccanctttgtgctaggctcccttcgcctccttcaacactgcactcangagaggctctgnagacttcttggtgtatggcanccacactcactnggnctcctccttcggggatgaacctgncaccacccccagaatgctctctgtgccactcctgtggatcacatactctgagatcccaagacttcattccagccctgactgncgcttctccgtggnnctgngaangaggccctaaantnctaaggcccnnnggnnctgangngttaaacggnacaataatctcaccaacntgggacactactccacaggactggaggtggcacagactgagctcctcagagcgcggctganagatgggcccagngaacgaaatggagggactctgggagaagtgnaccctacaataacaaaaag

SEQ ID NO: 2295 - DNA, 493 bp, Homo sapiens
  misc_feature (1)...(493): n = A,T,C or G
gcttttgggggagggntggcaatgacctggnctggacattgtcgccgaggtagatcactgttacccgaaggggtcttttcatgggtggaggctggtcccaccggtgtcttcaccctaaccgcaagaagccacttntgcaccccaccggactccccccgggtcgnagccgggcttgctctccctgaccagaaacccacctntcagtccccgccaccacccaccgcgcctgtggttggccaagctgcaacactctcggccgcggttggttgtcttcaagagacggttccgcgggaaactgaaaagaaacccggaacaaggaggcggggagacaggaggccagccacatgccaaggacgaactgctgggtctgcagggcctccgcgggggtcagagtgttgaggctagtttaggaggagtgggtcttggcaccagtctctggcggcgctctgccttagaaccaacggcagnccaggtttcccccgctccgtggctg

SEQ ID NO: 2296 - DNA, 493 bp, Homo sapiens
  misc_feature (1)...(493): n = A,T,C or G
cccctggaaacttctctgcaccaccnatgtgcacctccgcggngcgggccaccaactaaggactggcaagcttggaggtgaggggcctctgcgcctggatcccccaaggctccgccccgtgacgtcaggccccgccccancgcccgcttccaaganggctgcagcgatacctgcccnnttgtccgggtggcggtgacgacggggagcagaccaggtgactggttatccttgctcatttctggttcccgctggtcccagattggctgttggaatgcttttttctggcccctgtgacagntccaatttgagataatgcctaatatctttgctccccggggacctcctggagcccccacgatccggaaaaaggcagcgtgaacacagaaatccctncactccttacctanctctcangtcangaagcttgcggaggctgctggaaanaccctgancaaatgnccctgcttgngggcncccaaatggcagcgaagag

SEQ ID NO: 2297 - DNA, 485 bp, Homo sapiens
  misc_feature (1)...(485): n = A,T,C or G
caagaacttagagctaacnnacccccangcctcagtnacgagtngtgtcntctaggacttgggacactaccactagngtgtcgatgatgtcggcacaaagagcagttgttatnccgtgaccacataatnngggacttgngtaggaatacatggcgcncntacttggccctngnaaagancagccntcgnagatntnnantgaagacacttggcgaaggatggcgcagagnactcannctcnaagncctgcgtgtagcaaagcaagactataggaacncangcgctnatgctagnncagnggaaggagggncttctangncnggnggggtanggcntcgcaccaactanacaccccttctggacccttattgcagcctgcctgcagggctgggcagtgggccccagggttgcccagtttttgtgaggctgtacaacncatggggggctgtggggagggctgttggtganggatcctgtctttgagg

SEQ ID NO: 2298 - DNA, 484 bp, Homo sapiens
  misc_feature (1)...(484): n = A,T,C or G
ctggtggccccggctttanatggntcccacaatgtttgcagnanatgttcaggcacaggggnagctcatcacacacaatgaatggagacaatgcgagcagtgcagcagacagagctgggggccctgccgccacgcctgtccccatccccatcgggtggcaacgctgtgtgcgagaaggtgctgtgtactatatcagcccaagtggcacagagctgtcttccttggagcaaacccgtagctacctcctcagcgatgggacctgcaagtgcggtctggagtgtccacttaatgtacccaaggttttcaactttgaccctctggccccggtgaccccgggtggggctggggtggggcctgcatcagaggaggacatgaccaagctgtgcaaccacaggcggaaagctgttgccatggcaactctgtaccgcagcatggagaccacctgctcacactcttctcctggtgagttttccaaaaaaaaaaa

SEQ ID NO: 2299 - DNA, 481 bp, Homo sapiens
  misc_feature (1)...(481): n = A,T,C or G
tagcttactgaactgtaangncatantnaanacncatcactagactaactccctgnacctcttattnaagacncacctagaanggaacgctacntacactangntgggactttcacatgccagcacaggcnnctacntcacacngnnacccttccatctctttctgatnnttggaaggaactaantatgcaagagcanctcttnnggggaaatgggaaccattctggggatggnttggctgaaatgtgacttcacttttntgtnnttacactagcactggctgggcacaatggtnncggaagtnccagntactcctgaagctccccctnccccaccccaccaggctgtgtgctctgacctttcctgatcaggcccttcatctttgatctcttgggcagttccctcatgtgtttgtcattaaatttatggctggatttttttgttgctgttctgatctaaggcagaatattttttttttaag

SEQ ID NO: 2300 - DNA, 476 bp, Homo sapiens
  misc_feature (1)...(476): n = A,T,C or G
aaccaggatacccctgnggatgagaggacaggnccngnggatgtgcatgaccncccccnctgnncaggctccncagaggacaccnntngtaccagtggcncctaangcatgttctgncngangaacctggcancggactctctgctgcccacactggttggagcaggcagcccccgangatgtggaccggngcaatgaagccctcaggngggagcaccgggcccccaccctgctnancttgtacccggcacctgatgaggatgaagctgtagaacgctgcnnccgccctgagccaccccgagagcactttggacagaagatactggtgaagtgcctgtcactcagntngagatngaaattgaacccatntttngggaccttggncctgtatgatgtgcgggagaagaagaanatttnagaaaantttttactttgncctaaaattcggantcccgntaaggggctgcttccggccc

SEQ ID NO: 2301 - DNA, 475 bp, Homo sapiens
  misc_feature (1)...(475): n = A,T,C or G
cctgttaaaacagggaccnantcacttcacaggactggtaacctccaaaacagcctcagtgtatggaggaagctgtaagtaacatggtagtcgatgtaagtcaaacttacngtantgagaatcctcanacctgactattaccttnaggagggangaaccaggacattaaaancaatcagaatcagnaccnanncccancantgaaantctgaaccctacagctcggtgtctggnatcnggnatccacacacantcttctggnanccacttctggctttgccgnctgcagctcacaccaagacggggtttcacagaactgncaagntggntccanatgccatttgttcaaggatgccctaangcctgcagacagactgcccnggactctccccatgccttgttgttggcctggggtacttgtcccaagtcactgtgtggattctttntttgtactgatgatcactgggtcctgcca

SEQ ID NO: 2302 - DNA, 474 bp, Homo sapiens
  misc_feature (1)...(474): n = A,T,C or G
tgaggaggagggatccgtaaagnatgtttctgcggggacgccctgtgcccatgctgatcccggtacgaactggcgcccacctatagcctggacactcgttctgagctgncctccanccggctaaagctagactgggnctatggctatcgaggccggntactgcagggccaacctttacctcctgcccactggggaggcggggtactttgtggnctctgtggccgtactgtacagngtggaggagcanaganaacgacactacctggggcncancgatgacatcanangaacangagtnaangaggntntggtncgtntcagaagnngacttngtggagncnnnacngaggnaggtntctcttggggangngaggacacagaggancaaaagaattgcctacaggcngnaatcttgnnnanancngnnnggattgnatagaaatngcttatatacaaaggtgaattttttaaaga

SEQ ID NO: 2303 - DNA, 469 bp, Homo sapiens
  misc_feature (1)...(469): n = A,T,C or G
ctaatacactgtggaggtggggagtccagaaccctcccanacaacagcacctctggagctcctggtcactaggaattgtaattcacgaggaacttcatcaatcgcatgtctgacgacatcgccatcctgaagctcaagtatcctgtcacttggtcccccctcgtccagccaatctgtctcccctcattcaatttaaagccaagcattggaaccatgtgctgggtcgtcgggtggggacttgaaaaggccgaagggcacccaaagactccctatagtgtccaaggtttggctgtcaggattgtgaacaatgaaatctgcaatcatcggtaccagttcctcctgctgaagaaccagaaaaagttcattgggaacgacatgttgtgtacaagctcagaatggggcctggacacttgncaggacacctccggaagctctctggttggccagatgaacaagacctgggtccaga

SEQ ID NO: 2304 - DNA, 467 bp, Homo sapiens
  misc_feature (1)...(467): n = A,T,C or G
ccacccctggcctacaacactgacgganccacnacctcgctgcacntttctactgcaccggagattatncggcgggcantcaggnacccntgtccccttccttgataactggcgnctnnacnntannntcnganccttgngcataancnancntgnaaacttgnntncagctatttntngacannncggcttgaanggtnantgaacaatgnccnnactgggttaacannnngggagggggctcttgagattgaggtanaccttgacttcctaggatgaaaggtttgaggggaggggctcagccctgtccctattccggagacggagtcaggagtcaaaggattttgaaacaaattgccaatccctaaaattgcaagcggaggaacccagagccccgagttcacacctcccaacggtagatgggatgtatcaaacacacttccaactctttgctttccaaaaaaaaa

SEQ ID NO: 2305 - DNA, 467 bp, Homo sapiens
  misc_feature (1)...(467): n = A,T,C or G
gaagctggtacgttctctatggcctgaacaactgtggaaccagnaatgcagcgaaacctcaggnatcctggctggcccttgaccttatcctgaataggaaacgctcgccatcggtgggcgttccctaggtgcaggacagacggaacgtgaaagttgcaaataatccttacttcttccctctgaccagagaggatgggaaagggccgaagctaaggacccgtctcggtcccgcaccgcacggttaacacctggtaccgctcgcgcggattctttaaacgactcctagcgagccagagactctcagcagcaagggcggggttgggctgaggttcagtcacgtgaccgtgcctgagtgggctagcggcccccaccccaccagggggcgtcccccacaacgcgtggtcgaccctcattggcccatagtgcgaccaatagaaatcagccatctgggatcccagcgttccgaa

SEQ ID NO: 2306 - DNA, 467 bp, Homo sapiens
  misc_feature (1)...(467): n = A,T,C or G
cggtttttggctgccgttggagtcgctgtgccaccgggnaggggcncaccgngcccagctttgtccggctttgtgtnggggccgtggttaaaaaaggtctagacgtggatggtatttaccgggtgagtgggaacctggccgtggaccataaactccggttnctggtaggacagagaacggncagtgacctntgatgggagatacatgttcccagaacaggcaggacaaganggcaaattaccattcagacagtgcccgaatgggatgatattcacntggtcaccggagctttnaagctttttttccgggagctgccacagcctctggtgcctgcattgttgntgcctgattctccngatgcccttgaactttctgagccagagcagtgcctntccaaaatncagaaattnatanactcgctgccgnggcccanccatgacactntnaagtacatcctggagcatctg

SEQ ID NO: 2307 - DNA, 466 bp, Homo sapiens
  misc_feature (1)...(466): n = A,T,C or G
ctacacggtgccgcttcgngtctcttgataagcctgcggactnttntttnaacantgagttctngtgnctngngggcaanaaggacaggtngaccccttattaaaagtaggatgcaaaanggntaantcnagccaagngagccntnctgngctagacccagcanctatagnnatgtgaggnggacgaccaagagctatctgaatcctgnctgncctatnctgctggnccagntnngagcagcaanannnaggncccaaggnctattgggcaacatggctgctatnatgactgctctagggctgcccatccctccagaagaggatactctggggnttgtcccttttggggcctcancctttganaggaagtgcataggctacatagtgacccnanaatatggacactgnacagaccggactgngagggacttggctctcctcanggctaantactcagcatagaagg

SEQ ID NO: 2308 - DNA, 461 bp, Homo sapiens
  misc_feature (1)...(461): n = A,T,C or G
accaggacagtgcctctccaaanccaaaattatagtactcgctgccgagcccaaccatgnacactctgaagtacatcctggagcatctgtgcagggntgntagcncactnggantaagaaaccgantgaccgcccacaacactgggaattgngntnggaccgacactgtttcgacctgagcaggaggcctctgncatggcggnccacgtnttctaccccgnncagctggtccagntgatgctcaacaactttgccagcctcttaacttgacccaggcgaggaagaggaaggcnctttcctgtgatttgccacctagcctttggagagggctggcgggttttctgttctgaagatacaatgtcctcccangggacacccttcnttnncngctccagtctcacttgagctnctgcntaagagggnttggctgaaggggaaggtataggaagcccgcttgtgct

SEQ ID NO: 2309 - DNA, 459 bp, Homo sapiens
  misc_feature (1)...(459): n = A,T,C or G
agtggggtctttcacatggcgtggtggtgtccgantcacttgtacaactggtaacgctgcggtatggaccgatccagctgcacagcatccggctgtgtaagagggcacgatctccgactgcgccatcctttagccgtcttctctcggatcttggagcttggagcgtgccaccgtttctccagggaaagagtcaacaccagcaacagtggcagccacatattcgaaatcgactggggccctggcaacagcagcaggtggtgccacagagctcagagtttggcttgggctcagcctcgggcagatcagctcccggaactccattttgctagcgtaaccctgggacctagccctacaaactctggtagggataggctggggaagctggagacaccgactgaccgaagccattccggaagaangagcccnacagttccatacgcattttcttctaatcccagg

SEQ ID NO: 2310 - DNA, 455 bp, Homo sapiens
  misc_feature (1)...(455): n = A,T,C or G
gtatgtgagggtagaaagcacctcnnttgagcttnnnaagggcctntnttngnnncncagnaaccacatgcnggctnccntccatctgangagagntgngactccctttttnnnantganagnnnactncntctgtgcgcttatanatnatnaangaataatagttgaagcncctanttccananctgnggagaagcatcttccnaaaggacgccttgcaggcaatcacaccagggcaaggaggaagtagcctctatcccggatctatcatctgattctgcttactgaagtctcattcttcaccagtcagactctggaccttgactgagcccacactatcccccacagttctctgtggctatttatctgttggaatttggaaatagttgtttttctctgactcaggntgctctcctcagtcttgactctttagtagactaaactggcttcactca

SEQ ID NO: 2311 - DNA, 452 bp, Homo sapiens
  misc_feature (1)...(452): n = A,T,C or G
aagaaatagtaattactacccctncccccatcgctgaaaacctgtcttggctacgnggntggtaggctncctgctgnttgcgntgctagctcacncccactgctggnaacactagnacggaggccactaccacgtgaccaccctctntanttacttgggacacagcantattatntcctnggccnggnaattngtggatnccctacccccttcnctttcatcaactggtgtcaccaacaataaaatttggagcnttggatgcagcaantgaaaacanaactaancacngcggggnngcanggaagcaanttntactcatnncatgttgagcttgccggtacgtcttccagggattttggcgcacatgtgaaaactgnaacagaagcttgnggngctcaaaaagggttcggnagggtgtacctggggaggcacaagaaggaatgggcagggaa

SEQ ID NO: 2312 - DNA, 449 bp, Homo sapiens
  misc_feature (1)...(449): n = A,T,C or G
ggtaggcgggcactctatgccactgnggnggggacacccttcctacttggaggcctactacttcatggcagaggcatcggagaggaggaagctgcgacttgcagtcgatggtatcgggcgctttggcagacagggntnctntgnataacagnctggctgnnctgnaacttgctntgnaaaccaggctgacctngaactnacagagactcctgcttcctgagtgctgggaatcaagacctacgctaccacactcagncgagtccagcctttcttttctgtcacctcagtatttgactttacgaacagnaaagngatagctttgtgatggtgtctctcagcgatacattctgggtgaagtagcgatggcgatttttctacttcagncacttttcaccattgactatttggcatcttcctataaagacgttncctttctaccaaaaaaaaaa

SEQ ID NO: 2313 - DNA, 445 bp, Homo sapiens
  misc_feature (1)...(445): n = A,T,C or G
tgttccgagtcccacgtgaagaccaanctacncnnngngcctgntacacatgcncgtggatcctacanactgtgagttcngcgaagggcaagaataagaccannaaccacaactttngagccagatttgaagcaagctctattaaatactgaccaggatgatggacactggtcangnncttactcanganccccanantacantgtnanatnacattactgcaaagcctaggctaggtactnctcaccttcatncaatcaagggcaancntacatttatgacgnacttnctgcctatgcacctcccacctacttgagctcaatcacatnttgaacagttggggcancttagctngnttagaantgaaagcanaattanggggctagtgtggcttacagggtagaggcattctagctctctctctgngtcgtcccgtaccgtaccg

SEQ ID NO: 2314 - DNA, 445 bp, Homo sapiens
  misc_feature (1)...(445): n = A,T,C or G
attgcaggcacgagaaggaaaggaagagaccaagagaagagactgaagcaatgcagaagacattttctccagaacctgggcagaaggagccacaactctcatttgctggctccgctnggggaattcaagccacggtcctaagggcagacaagcgtcacgggtgccatttgtgtgggaagagttttgcccagcggcccacattggtggagcacctgtacactcacacaggtgaaaagccgtttcagtgcccagactgcaacaaatgcttnggccgggcttcttccctgaccatgcaccgagccatacaccgaggggaacggncgnatcagtgncctgactgtgggaagagttttacccngnggtccacattggtggcacacatgttntnctcacacaggggaaaaaccattttgttgncccnactggaacaaatccttcaaacggt

SEQ ID NO: 2315 - DNA, 439 bp, Homo sapiens
  misc_feature (1)...(439): n = A,T,C or G
tggtactctgggagggaagtttnctaagtgccnagggccgntgcagcaatccatgctcancctccctgtgaagaagganacntgantgtngtgnggatacaacagangatntacntntcctcggagatntcganggangncctttcttctcagctntnaacatatananaatctatagtgnacatnacaagatnttgaaagcccctaagggtctctaatatanatgntttcctggagaangngancatttattaaacaatgaaagtttcctatntaatgcnnntcanaannttgagctntcctattgnctggtatgagccaatgaattcatgcatggaatcaagtcaagctaactatacatagtttaggattaatattaagtgcctnagtacatgaantagcaccaataacanaancataactaatgtaaaaaaaaaaa

SEQ ID NO: 2316 - DNA, 438 bp, Homo sapiens
  misc_feature (1)...(438): n = A,T,C or G
tgcgagatgatggcttccaaccgaccattcttcgaagtggagatgtctatggttatagttcatgcacagccagcccccccagccagacaaagctacaagctcgtaccatcaacccacctgccacgtcacttcccaaaactgctgtgtcagtccctgcaggccggaccaccttgctccctgtgccactgtctggcaggctggctaaagggtccacagcagccctagccaagcatgccaccactaacctgctgctgagctccctgaagcagtcgagtgccagcaacagcagtggtacaacagtaggcttccctgcccacctatatccaggcgtctacccaaccatgcggctttctgtggtccttgaagcactggtcccactcaagactncctgcttggatgttaagcacggagcacagtcactgcgtttctttccacaag

SEQ ID NO: 2317 - DNA, 437 bp, Homo sapiens
  misc_feature (1)...(437): n = A,T,C or G
ttcggcactccgcgcgcatctcttgtggcctggcaggatgatggacgtggcgcccgctgagccgctacccaggacctcaccctcgtgctaagcacctgctcccggtgcccacgcgcctccgtagtccacagctgcgcccttcgtggtcccttggcactctgtcccgttggtgtctaaagtagttggggagcagcaggaagaaggcacgtgctgcgatctttggcgggagagatcggagaccgcgtgctagtgtctgtctgagagtggggggagcccaaggaaacggaaggagcctgtgnaacgggttccaggctgtgtgcaagtgaaaagtgggggctngttgcctttgcccagnggggggtaanaaaggggttaaaggcacagncncagngggnnggacccaanaggggggaaaaaaccttatttttattccaaaa

SEQ ID NO: 2318 - DNA, 430 bp, Homo sapiens
  misc_feature (1)...(430): n = A,T,C or G
cactagtacttcatggaaacacttgctttnacggaccatggagacnccactgtcanttgtatgntggncncctangngccttacctggaannccactaganntanacttttancgnctggnancctgcatnnaatagnggnnancnancattgcttggaaggtggctgtcgtaatgtntgtanctgcanngnntnntcacacctaggtgagacccggacctttanactccctagcntgannatgagggcgaagggagnagnctcctttgnaactacttaaaaccccaggctagcgtgtgctcgaaataaggtcactagtaagaagtctcaggagtaatggagtctctcagatccctggggaccagggataccttgcagggcactatactgagggaataaaacttcccataagccagtcataaaaaaaaaa

SEQ ID NO: 2319 - DNA, 428 bp, Homo sapiens
  misc_feature (1)...(428): n = A,T,C or G
ctctgtggaaaacagaattgtatgtgacatttctgaccntgaagaatcacattctgcctcctggaatcaagagtactctccagaaaagacatctgtgtggcggcagcaattaccccatgtgcttgtcatcagatcagcaacagggtctgcctgggtgtctctgagctgtcactgcccctgaactgaatggggcatttatcacactgttatagagagatcagctgaccatcatgcacaggccccacgagcctatcaattagctactgnanngtntgttagcccttgcncaaacncacanncactctgnctctggnactgcggnctcnttatcagtctcctccagcctctgnaagagtgataaggcatgagctcgccatcctctgccatcccccatctccccttggataaagggtcacttaattagctaa

SEQ ID NO: 2320 - DNA, 426 bp, Homo sapiens
  misc_feature (1)...(426): n = A,T,C or G
tgagaatgtccttgagcctgctctagctgcacccacaaggacctnctactcatactaaaggaagcaccngngactgggcctgcctggtacagtgtatctgttttttntctgcctanntcaangcnttatgtcnctgngaggctaanggaaagccatcgccacagctctcatccaacagctttgtcctgacctgncgaccnggattctctcatccccaagcaaattaaaagaccaaatgtcattaagcaattaanaanggagcaaatgcantctgncttctgtgtctccaccanactcctgctccaaagaacctgcttcagnccctaaggacaaantggctctgcaaaccgagggcagaagaggacctggcaaggtcttatagcantgnctggcacttacncangggtctggaccacctgttggggt

SEQ ID NO: 2321 - DNA, 421 bp, Homo sapiens
  misc_feature (1)...(421): n = A,T,C or G
aataccagcatgcagncccagaannagctgtaaggattcacattgaccttcaaacaaaggagatctgtggcaattcactgggggacgtttgccttagctaatgagcattacctagnagccgccagtgaaactgaatgaagctctagagagatacggactttcttgtgaggatttcttcatactgaagcatggagagtcgagatacttgaataccgatgatagagcttttgaagaaacatgaaactaggaattttcagtgacaacaaaagactaagaaattcacaaatattatgacacttttcacatggaaacaatnnatgnaagagtgcgcntngttttatattataactngccanntganaanactagcttacataaatngcgggagtctanggntgggcatttaagaaactgtccaaac

SEQ ID NO: 2322 - DNA, 420 bp, Homo sapiens
  misc_feature (1)...(420): n = A,T,C or G
ctgggtacttgggttncngtaccctgcngggctgtgttgcagntgnnagcaggccctgcctcngccggcagacggnggcctgncgngngacccgcctgactgcngnancacggngccttnncatagcttggtagagaanccgcnanngcttagcttcattctatgcgngaggagctgangtgtatcaccagcagtcagaaaaacaaanccttatgttgttttcttagcactttctccaggtagatttcaggctgcgcttgaacgagggaaaaaaacccaaaacaacaaaagcacaaaagaacctcaatgattaagttgggaaaagtggaatttttaaangaacnatntaaantgatctcnaccagnctaaantatangtgcacacatagagtataannncagagaaagactgaaaactta

SEQ ID NO: 2323 - DNA, 413 bp, Homo sapiens
  misc_feature (1)...(413): n = A,T,C or G
ccattctggaccctcctttcttacctgcacccnanggnangcctgggnctnaggagggaccctgagagccantgnactctgngnnctccactcttcaccgacccttttccactgctgctgaggacctgagaagagtccatcaagggggttccagtctcaaagaaattggccaagttccaggctactcggcctggttaaaaataagangtgtacctcagcagntgtagagtccccagaacggctggatgctggaccccaaatccatccctgtaacccccatgaggccctgttctctactgtcccttggctagacctcctccccaggctgtgncctgctcaaccttgagtctcctgggctccaggagtgggaagcacctggcatataattgcgacttaataaacgaatcaatcct

SEQ ID NO: 2324 - DNA, 411 bp, Homo sapiens
  misc_feature (1)...(411): n = A,T,C or G
tgagaacccggctgtgttacncgtaacttggagatctttcntcgcttttggctttggtttggagaagcaggcctcctagccggcggctcccctgagctgttngttcttctgcggctgtggtgccaagntcagtgnaccttgttgcttcaccaaaggctggcnngacggaaactgttcagcatcagagagaaacacaagctcgttgaaactcaacctcanacactgagaaactgngatttgacanaggctgtttgcaaactccagccacagacaacggttcctcctgtccatatagcgtcagnaagtgccgctctaagtgatctcattgctatagnctctgtgtttaatgcctgcagcccgaagtctcttacttcctttgttaaagggctttctgctccttaaaaaaaaaaa

SEQ ID NO: 2325 - DNA, 410 bp, Homo sapiens
  misc_feature (1)...(410): n = A,T,C or G
atgcggactctactaacctggactctnaancagcagcctaacccatgtggctncttcactacangagncnctncannggtcactcccttagtgctctgccaaacgtgtgggcngacaccattgtnctaagagggngctactgtctgacggcgttcatatagaacntnangnggtncaggcaancttnnaggaccacacagaaggactttctgataaagaacaaagattggnggatagactttatacgggnttagcgaaaggacagaaagcttgcctagcnnaggccataactntagcggaatcaacccatacaaggaagagggagctggctcaggtgcttntgcnnagagtnttagccctccaacgggagcaggagctgcngaancnaggaaagcccctcacatttcgag

SEQ ID NO: 2326 - DNA, 403 bp, Homo sapiens
  misc_feature (1)...(403): n = A,T,C or G
tctcagtatccaggaacgagtcatgcccagaatacctganntctnagccgtantgcggcccagcagcagtgcgnnggttnnaaagctcggctccaacccagcggacttcanaagcngccggngntgcaggtgcncgccctgtacantcctgtnannccncncnagacactnaggaaggaactntanccntagggcnaagcactcagactgagaagaccanngggctttccggaccttgnagcacncccgccgnccacatgtctactctgctgatccatcatccncactatgcctggntgcaagacctggggctccgcgagganaacgagggcgtgtntnntggaagctggggcggcttggngagaggtaattacnacctattgtcctgctaacaatgagccaa

SEQ ID NO: 2327 - DNA, 402 bp, Homo sapiens
  misc_feature (1)...(402): n = A,T,C or G
aacctggggcagtacgggtgctaggcatnctcgnagaccgggcatccgngttcagcacggncacttgatcctctctctcctttcttgatcagaccccactacngtagntctgtnccctacctgttagcaatgacaccccacacccccaccccacccccgctacccgagtattttatgttactaaggaattatcatcatccttatcgaacgtgcttacggtaatgtggctttaaatttaaaacacacacacacacactaaagtgttgataggtaaaatgatccaatacgtttattttgttttagactaagcctctggaaactaggaaagaagggaataaattaactgaggatgtccttcgatgntggagctgngggatatgtacacatatgctatcataccag

SEQ ID NO: 2328 - DNA, 400 bp, Homo sapiens
  misc_feature (1)...(400): n = A,T,C or G
aagcctcaggaggagacgtncccacgcaaaggtgcttctagcccagcccctgaccctgagccnttgaagggtcaatcatgaatgtttgaagagtggccttttcccagagccccacaccctctttccacaggagaaacatggggcctccccttncccaacctctgcagnaaatgactactgcacccagacagcctncgttttctagaagtctatttatattgtcattttataacactagctgtgtctntgtctcagnctaggaacagatggnccctgacctatggggtggctggcccagggacagggccactttgaagaatcaggctcctgtcccccaccctgccgccagtccctnaagttagttttacaattaaagnattttcttgtttttggtgaagaa

SEQ ID NO: 2329 - DNA, 399 bp, Homo sapiens
  misc_feature (1)...(399): n = A,T,C or G
acgttctgcacagcatgccccactgtcttngcangaggaccccaacgaggctacaaatacnnattccagtatgcatntttcaggatgggactcacacatntagacatagtcnggncgantttcttacagnntncanntaaccaagatcangcaganacacatttacctggagcgccttggncggtaccagacccctgntaanaaggggcnagacacagatccctaatncctcactgaggaacnttctcagnagtttctgangctganttnttggncaggacagcctgttcctntgtnaatgattttcaagntttttaaaaaactcttggntcnngangangaggangaggctgaaagcccttcntctgaggaggaanaggaagaggaggaagaggagga

SEQ ID NO: 2330 - DNA, 391 bp, Homo sapiens
  misc_feature (1)...(391): n = A,T,C or G
ctgcctactcacaggccctgactggccatgtaggctgntnctgctgctgctggattccttgtgncaatgactgccancgacntctncacntctgagaactgaccttctagaggcanncaaggcagatccanctcaatcaccgcctaagtnccctnatgncgnctnaaactttcagcacctgaccctgggcagttagtttatnnnaggaatattcangctcngagaantttntggnagagaaggagtattntgaanngatggncggccctgccttgctccccaccccctgtgctagctgtccaggaanggctagattcacagtggcatttgcaactcatggaaaacaacaaatgcttgaaatagaccgtacccgagcccgggaatggaaaaa

SEQ ID NO: 2331 - DNA, 391 bp, Homo sapiens
  misc_feature (1)...(391): n = A,T,C or G
tttactgtaggcatcggntttccttgnaaacnggctgcctgcctatcttgcaacctcattcctgnatacgcgcccgcctctgnctccangcatgctgaagattgaaggcgtgcaccatcancgtgcangcgtntntcacgacgctgaagatggagcctcnttagnggaggncctggctgggggggttcccgnnngtgtgcttgtgccagncactccagttcctcctgaggagtntcagttcctgctactccgtgagggcactccatgttggcttcttctgagtgtagcctcagactgaggggaggcaggaatttaaggggcactacggggacttctatagcttaatcccacaaaagccatcgcttctggcctgctctgttggccacacctg

SEQ ID NO: 2332 - DNA, 389 bp, Homo sapiens
  misc_feature (1)...(389): n = A,T,C or G
acgtggactagcgcactnaggtttacttttcacgatcgngggagancctgccatataatgngagagtncacancactatgcctttgaangngtntagacntcnnctctganatcacattcatgggattgtgcacgcccangggagnccaggcnccttaanccacttgaggaggatatggggccaangtnagtgtgcctnccctttgntnagnctnctttnagcaccccccagggactagtctgtgatgatncgtnaataagaggtcacttagtaaaaaagtactncaggnagtntatgggagtctactccagcatnccctgggnacncagggattactctttcagggcacttatatcttggagggaataanactccccatgaagaccag

SEQ ID NO: 2333 - DNA, 388 bp, Homo sapiens
  misc_feature (1)...(388): n = A,T,C or G
tgaggagacagtatgacagagtccctgctgcgcaaaccctgacaccttttacgatgctgcttgtattgaggacttagaaagctattcatctcgctgccgtacaaggtagcttctcaaggcctctttttagctgctgctctgttgaagagaaagaacccgctgaatcaagttcatcggtgatatgaaccccattcttttgttctagatactcgagcctatgcaacagaacattcccgggaacaacatgagtggcaggcaggctagctcaggaaggcggggcaaagccttggaaggacagatgttgcgaggccatccacgtggggnagaaaatgataaagtcttagatttctacgccttgcctcctccacagggtttaagttttccttaa

SEQ ID NO: 2334 - DNA, 385 bp, Homo sapiens
cattctgggacactcggcagtctgctcctcttgatgcaagccagggctaaagtcagttctcacctgtatccctgccttggccccctagtgagctcctctctctttctgaccttgctgtgcagactccgctcctacactgggaatccaacctgacctagaagagctcgtccagccagttcccgaccgaccaagcctctcctcactggtgccccttattctcccactccagcctcatcttctcccaacagcttgtacttgactcttgtctgcttcagcatccttgaagacatcatccccatctacctgacagttttcccatcccctccggtctcaccttgagcattcattcctaggacaagactctcagattccccaaaaaaaaaaa

SEQ ID NO: 2335 - DNA, 238 bp, Homo sapiens
  misc_feature (1)...(238): n = A,T,C or G
catgctcatccatacnaatncgaaataaagaggcgagttcancgccnctggcgnanncnctgcnnngancncaagagnnnctggcctgatgacgcagncggtagcctggcaacctaggttccgtcaaggaacacgtggtagaaggggagtaaggactcccccaagttgtcctctaatctccatgtttgctgaggcttggggtgcgtgctctctgtaaggaaatatatgcaaaacaaac

SEQ ID NO: 2336 - DNA, 381 bp, Homo sapiens
  misc_feature (1)...(381): n = A,T,C or G
actgaggtgcctttctctgcagctatccccctgtcctataaatggatctctcacaccattcctgctcctccatcgagtcaccccattgaagggtaccaaacttcgtaatgggtcctgtttaacttctcagaagacattgtcagaattcgatggaacccgaagcctcactaatcatagcatcagtcaagatgctcatcagctggactttttctccagcaaggaagcatatgatgaaacttttctctgttgatgaagccatctttgttccgatcggtcatgttaaaagcacttgaactccccaganngaaactaanacacgcctggcagacaccttggatgctgggccctnggggcttttctttgccctcaggctcttcttgg

SEQ ID NO: 2337 - DNA, 380 bp, Homo sapiens
  misc_feature (1)...(380): n = A,T,C or G
ctgggcagagcctaattacttnttgtggcaactctctaggtacggacaggcaagcanggctggttcctnccntgannaccaaaaangagacnngcncnggctnacacctggatccccgcagataggcaaaccctagtttgatggacccagcaccctgtccctaacagccccgtgctgcggacctgaccgtggccactctcccccccaaccccccacgtcggttcaagagcctgcgccggtgatgcctaaaggcttcctggctctcataacagaggtggagacgctccagtctccagatcagacccagaggtgtctgtgggcttccactcactgctggggacccctccttccactgaagctccttgtttagaaaaaaaaaa

SEQ ID NO: 2338 - DNA, 378 bp, Homo sapiens
  misc_feature (1)...(378): n = A,T,C or G
gttaccttatacataccctgactgggantncntacaagtnncctgagtaagaccttngtcacagcacactngcctncaggnangctgaagngtgngacagcacanctgaggcaagcgttctntgactgactcgcctccnggcaggctgaagtgtgcnacagcagnctgagnangcgtttntgactgancagggcctaaggntactgttagcaccattactcattagtgggactgcgcttgctttcanactcttggttgatctctaancaatggnatatgctatatttaaagtgntaaaattnaggancacagtcntancaaagctatagntnttnttacatangcagnaaaagatnactgataaaaaaaagggagagg

SEQ ID NO: 2339 - DNA, 378 bp, Homo sapiens
  misc_feature (1)...(378): n = A,T,C or G
ttgaggaggtgccacccaccccagctgcggcgggnaggcaggagcgccaaggcccgtgtcccgacccgccctcccaaaccagtgacgattatgagggaacagagatggcttcctgcaggccaggagatggnagatttaaggttgtcgtcgccccccaccccactgtcctgctcttctgcatggaccggctgaagtgnggggagctttagtttgtattgtcacagtacgtgctgtctagctcagcacaagtgttctaagttcttggaaggcaggtgctgtgtaagtacactaaggatgtgggagtgatggacaacgcaaaatataaacaacagtgactccctttacaataaacaattagacttgctacacaaaaaaaaa

SEQ ID NO: 2340 - DNA, 376 bp, Homo sapiens
  misc_feature (1)...(376): n = A,T,C or G
gaggtcttgctgtgtgactnctggcctggtcttgaatttgtagccatcatccgccccagtctcccacgtgctagaatttcaggcatctgccacctgcacagctcagcctttaatagttatttcccaagaatattaaatgagtcaacaaagtatccttagactggctaataaaagacacagctcccagctcttattatacagcagactgatgtcaagccatcccggtaagaaagcacacgtttcccacatcctacctctgtgaagtatttgttccaatcccacatggaatggcgcttccactgagatacactggactgcaactagacatgtgcagcagacggagagaaatgaaattacaataacaataaaaaagaaa

SEQ ID NO: 2341 - DNA, 376 bp, Homo sapiens
  misc_feature (1)...(376): n = A,T,C or G
cagctgggcccaggcctgaagattcaacagcctnngccaggttagcccccntttgtcctntgggctgnnncaacaggcccanncaggctttctgncanagactgnccangctnagctgagcttgcccctccagctcncttcctgactgaacangccttatnagttttctggagcccttttttagtctgcccaacctacanacagggtactcacaccctgggactnctttcctcctnggattaactnctgggttcctggtctttaaaaatacacgccgcctcaggggtccccagctgctccccagacagcgccacctacatggantgaactgctgtcccatctaattttcaggtggncaagagcatgggttttttct

SEQ ID NO: 2342 - DNA, 375 bp, Homo sapiens
  misc_feature (1)...(375): n = A,T,C or G
acagcaagggtcctgtctttcggccagtgcccccctcnncagttnacccactgggaagtcccgnannggggggcgggngnnntatcacncacnntcntngaacnctgnctncgtccctcgaggncttttnggaagacctnaagagagtggctctgnagaaggacttgccctggancatgacagtgngaattgtttgacctggacatantcatnaagannttnaaacctgtgangatagcttgctctcccagactgtattagagctggtttctgtcctggtccttcatgtatgtagttaagagagggtttccagcgtgttccatgtgaggagctggggtntccaactgtttgatgtttaaaatgaaatagaaccgt

SEQ ID NO: 2343 - DNA, 374 bp, Homo sapiens
  misc_feature (1)...(374): n = A,T,C or G
agcacagaactcattctggcttcacctgggactccagggaggtgtcccgggnaccgccatggtcaggctctgcacctctctaggctttgaatccgcacctttgcctacaagcgacagtggagtccaacttccacgcaaacctccaaaaccccaacaccccgcagggcattagggtccgacccaacctcttcaaatttgcagccacaatgaacccacgtgtcctgtttcaaanntncagcttgtatacttgggactctgcggcccttaanacctgaagctgtcctccagtgccatggtctcacagccaaccccgagaaagctcacacctgtcaggtttgtgtgaccccanaactcccgaggccttacaaccctca

SEQ ID NO: 2344 - DNA, 373 bp, Homo sapiens
  misc_feature (1)...(373): n = A,T,C or G
cacgcgctaccctctactnancacacatagtattntgnactggctcnttgggntaaaaccctgangtaanaantgctnacnnttctctgcttcctgactctgcttgagacctggccngagctgccccantcctgctgganctaggacttctnacagtccctcaactgtgaaccaanggaaactctttctcccttcggctgcctttgtctggagttgnaccgaggngacnggagatgacaccacgagaatgagaggtagacagaggctgaggtacagacggttaatacaccgcagagcggtcagctcaaacttcatcttcccaaaggctgntttttgattcttacacaagacagaataaaactttttttttttc

SEQ ID NO: 2345 - DNA, 373 bp, Homo sapiens
  misc_feature (1)...(373): n = A,T,C or G
aatctggggcggaccttgccacatgnggcangtcagttctttaccnntgannccccattctncctcatnggctgncctaaggnactgagctacagtggaagaactggagccttctatccgagatgatcagganatggattcggagtncaagaatgactttgcntactcctacatatgcntaanacttgtttagnccanacattctgtncccngggccanntnacagtttggcttgntttgctgtgtagncnagggctcctnccgggantcacngactcnnntntccatttcaanganactatatcagcnggttcgactatgcctaantcctatactgnggattgaaccccagagcctcgtccacaaaaagcaa

SEQ ID NO: 2346 - DNA, 371 bp, Homo sapiens
  misc_feature (1)...(371): n = A,T,C or G
ttcacccattctgtagcccggntagcaacagaangtgcctgagcgtgcagatacttccggnccccggggtagggcggnccgagtctgagcaaggtatctangcgtgcggggcatgtgtttgctccangtcaccaagcacgctagccccctctcttcttcggntggaacgcacaccgtaagcgacaagaattgtgtgagggtggagaccagacagtgattcaacaggtctggagcanaacacccccccacacacacatacacacaccccgtgcgcgtgcccatccctcanctcttcactcanacatatacggtggttgtgccttcggangatgcttgcagaaagggacgcaatggctgctttgggaaacctt

SEQ ID NO: 2347 - DNA, 370 bp, Homo sapiens
  misc_feature (1)...(370): n = A,T,C or G
tgagggagccctacgttgtggaaggaagacacagtataggaccatcagcaggaccggacagaggaggggcacgtangcatnaattactggatggcatacgctanttntactaaaaattaaaangccanttattgtatnantannganagctgntattagcggtgttgcnccaccacacccgacaaggaagcctgttttaagaagtgattccatggaggagttctgcggcggntcagggcttgaccaaacagtggacctcagacaagagaggctaaancaggctgnangngacaggangtattgaatanactgaaagcaaagggcagccttctaattacgcttngtggctacgtggacaacctggagaagt

SEQ ID NO: 2348 - DNA, 370 bp, Homo sapiens
  misc_feature (1)...(370): n = A,T,C or G
tgagggcaggtaaaccccccgctggcttacatctggatgtggtgaaaggagacaagctaattgaggtcctgaatggnacttgcctggaaanattgncgtgtttattcngcntccccgtcgcttgganttntatgnatatcttgnggtgcatatntncnttagtgnngtncngcnntctagancangggacaccnnaacagagactngtgcatgcatanatatgggaaanactancncnagactactttatgaagccagctcttccactganctttctgaagaccacaggcatgtctancacgtagagtttttcatcagagataaatatgananganganatactatgataataaatgcaatagctatcac

SEQ ID NO: 2349 - DNA, 369 bp, Homo sapiens
  misc_feature (1)...(369): n = A,T,C or G
cacctgtatgtgtgacntgaaggagagccatntacagatctctggttccatgatacttnagcntancttggagganttttnttttatgacnnganccatncncctnctgntntgcactgtcctntntngtccnctgangcnggaaactttccttttgncanaactganagcaagggcttgaacttatccgctgggatgggangagactacacgcccggccatcccctcccctggtcccatctctctncctcagactttgaagaatgttgatagcctcaggaagacagacctggctgtgggcacaacctcatggaaagatncctttgggaactcagngacttgtttagaatcttgtttcatggagacctg

SEQ ID NO: 2350 - DNA, 369 bp, Homo sapiens
  misc_feature (1)...(369): n = A,T,C or G
tgagggctgtgcctggctcttcctgagaagacctacgatgnngcgtngagaccncatgatgaggcctntnagtgtgctagtttcngngacattatnaagaaagtccttcctgcaggtggcccatnatgttacgctgtgnatggacaatgtctaacnctgngtgcatccgagacatctttngncactcaagtgtannctgcgactgntgacngagctttggtggttgnagctgaccngcctnaccacagttctgaaaactatnatgggcagaatactatgtgtcngaagatgaaganncanaggannngtctccctcttacagggcnaaacaccaatgcatatgaaataaaaattttaaaaattaaaaaa

SEQ ID NO: 2351 - DNA, 368 bp, Homo sapiens
  misc_feature (1)...(368): n = A,T,C or G
aggacggcacaggaagcatgntctggttccatatntctacctgccactaancgnngagctntngcncctcaccccncgctntggntttctantnttnnccaccnnctaaaggcttgtctccagctgataaaggcattgagaggtnncnnaaccttcagcanatgtaacctcngtgntggaaggttacctgtganangcccctgantggacactnggactcagcctcttctcggcccgntctctgcttcctgccctncagaaggagagcaactctaccctaccncnagaggctcaccgncatgtccgatctccccatgggccaaagtgatggtgctcaatggtcatgatgaaggcctctaggaactatc

SEQ ID NO: 2352 - DNA, 363 bp, Homo sapiens
  misc_feature (1)...(363): n = A,T,C or G
cacgtgggaaacaccttcctaatgtctctggtagctcactgaaggaggggacacagtcactcaggaatcaggttcccaaagtcatcacattccggggagctactcaaggtacaaacgcctgggaggagagagggttctgtcacctcttcacctcactgctctgactctcagcgccatcttggaactgaggaccctgcatggccttaagtagcataaggcagagctcccgcaggttctncggaggagcctgaggaccagcggntcctgtcactcagtcaactctggagaacacacttatggaagagtgtgtgcactgtggaantnttgccatggggtgactaccctggggctggaaccctaaaa

SEQ ID NO: 2353 - DNA, 360 bp, Homo sapiens
  misc_feature (1)...(360): n = A,T,C or G
atgtaatgaggagacacttgccttctgaaacaaaggtgantaagcaacggnaggcatcctgagggctggaatganaanggcgcccagaggctnacatgtctgaacacttggttccnacttgntgnaactgtnggataaggattangaggnggannacgnnantnactngnggcangatgtgaggttttcaaagcctgatncnngccccactgaaatctctgcctccaacttgccatcgagacgagacctgtgctgctgctctagccaacgatggtcatgctttgctccagcatcatggactggaacactctggatccttatctcacttaaacaaactcttttatgggttaaaaaaaaaaa

SEQ ID NO: 2354 - DNA, 360 bp, Homo sapiens
  misc_feature (1)...(360): n = A,T,C or G
aggaattcagtggtagggcaactacttttgggacacccttgccctccttggggtgctanggcagttcccagcaacacaatcagcagctgcttcagnancctgcgggagcaacggtcccagggttncctttgtgactgcactgngatggtnggtagtacccantctcttggcccatcgggctgtgctggcctcctgcagcccattntttcagcttttctacaaggagcgggaattggacaagcagggnccnggngtgtattcacaatgagattgtcacggnacccaacctttggggatgnttttggactttatgtatgctggccagctgacccttanggggaggatactcctctaataata

SEQ ID NO: 2355 - DNA, 359 bp, Homo sapiens
  misc_feature (1)...(359): n = A,T,C or G
aacaccttaaaaaaccccnggtcctgcntccctccttgtgctcnggcagtgacnggccctcctccgnctgangacactgagctccaggtcacnntccgngaantgatgaatnngncgccngcgnagccgananangatncanccctggagccccagcctaggcgaactacttaccannnngnaggctctgacgcttggcaacctattcctgctcgcggccaccgctgcacttgggtctgccagtgttactctgctagtgtggctgttttttcgatggtacttaagtggcaactaacaaatcctgatcctacatctgtcctggaaataaagtatatattttagttcgttaaaaaaaaaaa

SEQ ID NO: 2356 - DNA, 358 bp, Homo sapiens
  misc_feature (1)...(358): n = A,T,C or G
ggtacatcgctccagcagctccancttgcaagaaggccaccacacaanagcagggaaagggggncgaaggaaactccaatcaactccaaaggctgtccaatatccagggcctcttgctgctccgtccgagagttggaagctgttattcccagattagcactgatgacctgaggggnncagctgctggnctttgggccacatcagaagctggnngangctggtttcttttatcagcaaaggagtccagcagcaacatgatanacactcccacancccanaaccaaggnaggcacctcacactggtctttcagntctcactgcatagaggctgcnccccgnaaaggtgctgccacactaa

SEQ ID NO: 2357 - DNA, 357 bp, Homo sapiens
  misc_feature (1)...(357): n = A,T,C or G
acctgaggatggtgtttcaggccctgntgtctangccctgctctacngctgtatntagcttctgtgtgtgcanntctcaatggncgnacngnatgcnnnnatntcaagctgccgctgatgacttgtgaagtgaactgctgatttccagacaacgcgacggnagttgctccaaaagaacctttccagacaggtccacttctccttacccntcngcatgttnataaggcntgtgngcagctnctnacctgnnntcncagntacncaagantcnacttncggangatagatctcttgtgnctagttnaaggtgagcctgggtaacatggaaatacatgatgctcaagaagacaaaaaaaa

SEQ ID NO: 2358 - DNA, 356 bp, Homo sapiens
  misc_feature (1)...(356): n = A,T,C or G
agccctggcttgaggctgcccgaccttatccagagaccctctgtccgctggcnnggaggtggacaaagagttgactcggtcagtaattgcttgngtgaaggagacgtggctgtcccanggggagaaccaggattnaactctgcccttcagctacagctttggctngntacanagtctgaanacccatcancgcctccnatgctgcanccacctgtcctggagtcatanngcttaccaagcgtggaccccgcngaggccggccgggggacggcntccctgccccgggaagcangctgantactttttaagggacncttggtagacctattggggagaattccggaacaaagaattgt

SEQ ID NO: 2359 - DNA, 354 bp, Homo sapiens
  misc_feature (1)...(354): n = A,T,C or G
atcctgtattgctcagactggcttgcgnactacaaatnnctatctgcttgcctgccaacatttgagagcantagagtttgcnccaccacttcccggttcaaggntcttttaactgctaactgaaaatggaatgaaattgcatccatagcatactgatgggatgccaggcttggaaagtagctagaatgttnaaggtatgttgacaaataagcctcttaggttacaaaggagtttggggggaaaaaantatccattgtgaaaatgaaagtacagcctagctcacctggggcctccctgctcacaccaangcaggtttcaataaagactcagccatgcttccgtgaaaaaaaaaaa

SEQ ID NO: 2360 - DNA, 353 bp, Homo sapiens
  misc_feature (1)...(353): n = A,T,C or G
agtagcaggcacagcatggnatggnactggcagcacgacggnaaacagtaaaatattgtggnagnacaggtattggtattttgatgagagttttgacaagaataatcatgctgtacttatttatacactatacatagcgtttgtatanaaatgtctgtgttagcatttgtctgtatatgaaactctcaagtcatccatctgcttaaattatttgatgtgtattgatagagngaaaaactaaggttgctttctcagtttttcccttgagtgcttatttagtttgaattattttgtatacatgaatgtcttttattgaaacanatacaatttttttatgtctttaaaaaaaaaaa

SEQ ID NO: 2361 - DNA, 353 bp, Homo sapiens
  misc_feature (1)...(353): n = A,T,C or G
gtgcctcggtgctctaccatgctaggctntcgaaagacagaccggcttanancattaaccaaggctnatgtacgcgntcgcataggtntgtggaaatctgaagttgggaagaggatgccaggtacnccatngctaanaacggtgcctgtaccgntcgcaggctagcctgtgctatgactgaataccttgcctcaaatgtaacaagnngacnnnagagaacgnntgccctgcactggggntgnaattctngcgatggncnacggcaggacctgatnccaatgnnagncagntctttgngaccctggncccnangcannggctggacggnaagcatactatttttggccgagtgt

SEQ ID NO: 2362 - DNA, 352 bp, Homo sapiens
  misc_feature (1)...(352): n = A,T,C or G
atctacaaggggaaactatccattgggtggctaagggagctgaagagaagatancgcagtgtntganttcctgctcccaagatcacctggagagttctcccaagtgtgcgananntggaggaatgccgcccaagtaactctgctggagccctgtttnccaccagagcttccagacactttttgganctcagtggggaattatcagttggtggaaagtgactngtccatctgnctatttgtctgtctatttatctaacatctatcatccaccagnctgtctatcatntacatctatctatccatctacacatctgnctatttttctaagaattatttattttatgtatatgag

SEQ ID NO: 2363 - DNA, 352 bp, Homo sapiens
  misc_feature (1)...(352): n = A,T,C or G
cactgttgaacacgaagtttttatttttgtgtgttttttaatggctttacagaatattaaacagaatactgtttgacatgacggcaaaaaatgtngcatngccctngacgcctncncagctgnangnncctattcaccagcaatantnanttccaccnaaancttacggcccactngtgggantggcggaccccagcnncttntcancaccccgcattagtaaccgncaaccttaggnancgntactggttgggantccnnccccccctgcacccgcagnggtcgcatcaaactcncctagctgnggctgctggctgggttcccncttatccncccgcacccgagaggtcac

SEQ ID NO: 2364 - DNA, 349 bp, Homo sapiens
  misc_feature (1)...(349): n = A,T,C or G
ctgtcgatgcacaaggctcctcnctgnggactctgtttgntggnaggacactgaanacagnccctntgncactntctctttacttcttgntanctgccaagggacctgnggacantgctgaagcttagacagaanctgcggagccccacaggcncctctgcaagccagctgcccangtagcaagcggagggccatggaggcaaggatatgctcagaggnnttaactctactcagnaacctggctgacctggcaaatgctgtgcactggttgccccgaggtgtcctgtgggctggccgcttccctccttggntggtgggtctcatgggcaccatctccttcatcctcagc

SEQ ID NO: 2365 - DNA, 344 bp, Homo sapiens
  misc_feature (1)...(344): n = A,T,C or G
gcaccttaaagggaggacagcagactcaaaagggcccagccatctgcttggacagcttcagctcaccggagctcacgtgaggctctgcaaccacagaaacctatctcccattatttcctttttttttcanctganctgttttgctgctgaaagacacnagcagtctntacccgggagcattttttttctcctgtttctgagctaccttcctgcacttggctggtnangggaatagctcatgcctcgggtaccagctntggngggtaatcaattgcaaatgtttgggggtggatggntgacggatgagggacctttatctcctctcccattttttactggtagca

SEQ ID NO: 2366 - DNA, 341 bp, Homo sapiens
  misc_feature (1)...(341): n = A,T,C or G
gagtggggttctttacagtttncacctnacttccancttgaacggtgcatnnatacctgtttgtgtataaactgcantgcaacatcactgtcttggtgttcatgacctgcaaggaccagggaccgtggcactgcacagctctttatttncantanntactgnctgtgtcccatgnaacctntcattctgggacagnctgtnncntcaccanttacttgtgaagnaatncggcacacantacacaaactgtgcacacagcccaggnctggccccactgctttactcatccattactactngtntctagcgggctgccatgacaacaaaaataaacatgttct

SEQ ID NO: 2367 - DNA, 340 bp, Homo sapiens
  misc_feature (1)...(340): n = A,T,C or G
tgcttacttaagggcatttttatgtaagtaanggtgnttttttngcanntngtcatnntataannacnctgnannntttgatgatngggnnnntnggtgtctgtggtggcacaccctcctgaagccagacctccccttgcctaacccctgtaattgcagtctcctgtgactaatgtgcaccaaggacaagcttnaccagggcctgtttagaatttncctcctcctttggtggcccaacagaagccactcagcatctgaccaatcacagctcttcttgtgaacattgtcgatgtacgcagnccaattaaaattgccccctcctgacaccacaaaaaaaaaa

SEQ ID NO: 2368 - DNA, 340 bp, Homo sapiens
  misc_feature (1)...(340): n = A,T,C or G
aagggaggctgacgatgcatgattatatttatgangggccnaagancgcgtgaccacacccannctnttcatncattctnggnntgagngagtcacctgatggacgcctatncatgatgcgtgaagatccatgcgacnacctttnngacttcgcttcatncttggntgggtcctgcngatggaanncaggtngtcggacacagnaacaagctcctttactgacngagacacctggccagccctgaagcaggttcttttgtttgnttggntggtttttttgtttttgtttntccaatnttggggaatntaccaattaaaaataaagccacttaaaatggtt

SEQ ID NO: 2369 - DNA, 340 bp, Homo sapiens
  misc_feature (1)...(340): n = A,T,C or G
ctgcagacaggactggaagcctgncagtcaggtctgctctctcggcttggtccttttgatgtactccatccagggaaggngcanccatcgtatgctttaagggtactactcctctctgcatggcttccttttctcatacaagcgggtgccttgcccttcggntagnaactgnangntngcannacagtggcaccagcgnnagcacctnntgngagcttgacccaaatgcaanancactnnctgcancaaaaagnacagaanccncnctctacattttaacactcatccggaagcagntcggcatgcncagagcaaattnnagaaacactagcctgaaaga

SEQ ID NO: 2370 - DNA, 338 bp, Homo sapiens
  misc_feature (1)...(338): n = A,T,C or G
actgtacacacaattgccatttttgctacaatgggatgactagtaggaccctgggaatcaacgcaagctaggcattagcgatgcaagccaccattttacggnctggtgagaaggntnactgagnancancncctggctgatcntgnntaaggncccactgncttatcncnccaaccntatgnaggctgacagccatnnttatcaatgatatngactcccttttctggagtgngnataaacagtcntcngtgtacttanntataaggaaaactaatagctgggnnctttcaaaggctggnganatggctcagtggngtaagagcacctgactgctcttc

SEQ ID NO: 2371 - DNA, 337 bp, Homo sapiens
  misc_feature (1)...(337): n = A,T,C or G
tgagaatgcctgacacgagnccattaaggggaaaggatttacttgaacgcacagtttgaagatcccgtccatcatggcattgcaaccacagtcaggaaacagacgggtgaatgctggcactcagctctccagaaaccccagcccatggagcagtgccacccataggnaatgtgggatctttctatcttagttaccctantctaaatatntcccacagnatgtnggaggcttgtctanatccatctanatcncntcanantggncgtnaatcttttttttacatttttaaaataattnatgggcatgcatgtntgccaaagnatgcacatggatgcag

SEQ ID NO: 2372 - DNA, 337 bp, Homo sapiens
  misc_feature (1)...(337): n = A,T,C or G
atgccactgtgtctccctagttcctacaacctggatgttgcggacgaacagtgaaccttcaggttgcatggttatcttgtgattgtcattatgccagagctttgctctatgaggttaggatacaacaataagtatgtagactgataaaggatagtgnctgtgtntgggtatatttataccagtgtgatgacaagnacaaaattggccacataattcaacaaggtaattgtaaacataaaatgctaaaaatgtttgaaaatatgacaacataaaaacaaatttgtctttgtanagtgtatgaatgtttgcatacaaataaaggcagccttattttcta

SEQ ID NO: 2373 - DNA, 336 bp, Homo sapiens
  misc_feature (1)...(336): n = A,T,C or G
agtaaccctgggcatatacaaancaggtgggaaaggnagtctgcatagtgtaatgtctgatatgaagttctaatgactacacccacttctgaaggcctctgacatctacgagcctgttcttttgtaacctaacagaactcttcatgaaacagcagataccngngtggacagacncctaccgcnntggacnntctttactgntcgncttgagantcnnactnttgccttntncagngcagtgtctgccgntacgctgccctgaagngaatgnactgaacnnntganantgtgngccnanncaatgaaaagttggccttanaaaagttgcctaggcca

SEQ ID NO: 2374 - DNA, 335 bp, Homo sapiens
  misc_feature (1)...(335): n = A,T,C or G
ataaacatcacgatcaacctgcgtnctntaatcggacacgtnngnattccggcaagnttccaccacanccggccacctggacctacaaatgtggtgctaatcgacaagcgnaaccatncgaaaaagtttgagcaaggaggctgctgacangggaaagggctccttcagggacncctgggtgcttagacangactgaaagctgngngggagcgtngttatcactattgacatctccctgtgnaaattcttggaccagcaaatactatgtgaccatnatnnntgccccanggacacnngaganttnatnaaaaacatgantacaggcacattccagg

SEQ ID NO: 2375 - DNA, 335 bp, Homo sapiens
  misc_feature (1)...(335): n = A,T,C or G
ctgaattttgttgttctngcagtcttggaaaaccacanaggccgcangccgnncttttaccggtgncagcngacaccaccngggccacacagtgacctttgaggatgtggctgttctnctgtntnangaggagtgggcccgcctggnccctgctnatcggggcctctnncnacacgtnntgaaggacactctacggagaatgtagntntcactgnagacttnnaggcatctaatcctgtngtgatntnccagctggagcnaggagaagacccgaggnnnctgnatggacagggaancgagctgagccagagcctgggaagggaccacttagaacc

SEQ ID NO: 2376 - DNA, 331 bp, Homo sapiens
  misc_feature (1)...(331): n = A,T,C or G
tactgtgttgcatattctcccantaactggattnctcctcggaannacacctcccacggcttgcatagctctgcccccagcaagctantccaaggcactcactgtatgacgtgaggctcaccatacacttatcttaagggcgatgcntancaggtgtacacnccncctcccnttcaantangnagncccttcgagggggtnctggngactactngacaaaactggtcgtanccttttctgcactcatgcttattcttacannttagactaaaaggncntggggacncgngtacgctntgngggcatggaacnttcagtcttgccaggtttt

SEQ ID NO: 2377 - DNA, 331 bp, Homo sapiens
  misc_feature (1)...(331): n = A,T,C or G
ctctgcaaacctgcttgntaggggtggcagactnactgtgtcntncgntactgtcacgcncnctgcctggtaaccngcaacagccacacatgtgctaccttnctactggcacgcaggagattattgcggngggaanngggtcnncncccccttacttgcataacnggtggnacaacaaacnnaatttgcagccttgatngctcgnaaaaactanntaancntaactaactttaangnnggnngcttttacaccttttgttattctctctgacctccgagngatagccaggtcaattctgaatttccccaaataaaccattcctttcaccag

SEQ ID NO: 2378 - DNA, 331 bp, Homo sapiens
  misc_feature (1)...(331): n = A,T,C or G
ctttttccctgccttnngnatgctgtggagggagacccaaaaagaaccatgccggatctcctactactgggcctgattggggccctgcacnctgctgnngctgctgacnctgctggcctttgctgngtatncaggactgctgacnggngngacancnaccgctggatcaccccnnggngggaacataactgtggcctacaagttccacgtggggtcctatggtgacnctgggcacnntttcacanagagcngcagnanctctcccaagctncgnncnatcactgnctactatgacaacccccatacggccncctcctgacaaatgccggtg

SEQ ID NO: 2379 - DNA, 328 bp, Homo sapiens
  misc_feature (1)...(328): n = A,T,C or G
gggggcacgtccctgaggaaaaacaaatgctttacctgccccangcctgacgtgcngctacagctcntacaccnacaccancnccancgncactgnantnttcacacttccttcctcacagaagacntgcangagtcaacacgaaatggccagtggctaanacggccctgggtgtggtacgttagtgcacagctctcccactcagcaggccgaggcagggcataaccactggattctggagacagctcccggacttcagtctcagctttggtacttactagctgtgagacactgaataataaacttctttgtgcctcaaaaaaaaaaa

SEQ ID NO: 2380 - DNA, 324 bp, Homo sapiens
  misc_feature (1)...(324): n = A,T,C or G
tacgacaaacctcatcgccgaaaaggtgaggctaanatgagcattaccagcgacgaggtgaactttctggtatatagctacctccaggaatcaggtttttcccactctgccttcacgntggggatcgaaagtcacattngccagtccaacatnaatggtacactanngccaccngctgccctaatntccattcttcanaaaggactgcagtatgtggaggcgganancaacatcaacgaggatggcacngtatttgatgggcgtccnattgagtccctatcgntaattgatgctgcgatgcccagatgtggtacaagacaatac

SEQ ID NO: 2381 - DNA, 324 bp, Homo sapiens
  misc_feature (1)...(324): n = A,T,C or G
taactgtggctgccttccctgnagtgggnatgtcaccctgttcagtgtccgcggnagaatagnnctcacagcactaggaccttgtggttgtagcgtccgtgtcttcccactggggagcccaggtatggagctgggactgttcacagcttttctgtgcgccacctctgtttctctgtgccttttcaatgtctagttacctcctcctgatccccagtggtcttttctttcctcggaatctagcccttctcatttacacagtggtaatggggaaaccttgtcttccgttgcacttctgaagtctacaacaatatttaaattacctca

SEQ ID NO: 2382 - DNA, 324 bp, Homo sapiens
  misc_feature (1)...(324): n = A,T,C or G
tcgactgcgtctgtgcttgtaggnattaggagcggagagtcagcatctctacgggatggggttttcaataactctttaaggtgtaattatgttaagagcttcggactctgacacatcactagggctggaagactgaatctctacgagacacatttcagcgttcaagcaagatggaaagaacagtcttaaatacgaatcggcttttgttctgggggngggatctctttttgtctttcctagccgcacagcccatgctttctgatacgagctgttttcgctagtgttccggtgcagaccagagaataaaccacacggctgtttgtt

SEQ ID NO: 2383 - DNA, 322 bp, Homo sapiens
  misc_feature (1)...(322): n = A,T,C or G
acctgaggtggggtgctttacctgggcatnccctggggagatcgcagtgcctggaccctcctncaacagcnaggaacaagtattgcngttnttcanagtcctacagtgctgagaatccccncagangaactccttcgtnngcggccatatgaggtgcgaacagcctgtcnttgtnatcagaggccccagacntccgccgacttcattccttntacatcagatttcnaagctgttngnntgggtnananacacaancctgnattntgacnccaantgctcaataantaccnagttcacgtntgactggcaaagcactgcttgg

SEQ ID NO: 2384 - DNA, 322 bp, Homo sapiens
  misc_feature (1)...(322): n = A,T,C or G
ggcccacccttgcctggtncgtantgcagacagcgccagacatgcanacacatattcctatccatttaggtaagtccaaatcaccatttgcagntcgcaggcntattttggnaaccagtgcnggtggactatnnnctttttnaagctgccacaaatataatgggaagcggtngnccgagantgggttctcttggcanangggcngcatcnngntgntgccaacattgnctccncacctatgancttgnnaaggnctaacatttggaaggctaatgcagaaggaangctgctagacaaagctagactggcctgaagcttgaaa

SEQ ID NO: 2385 - DNA, 321 bp, Homo sapiens
  misc_feature (1)...(321): n = A,T,C or G
gctaaggactggaacgccttnactagggctgcagcaacgcagtacnatngagtanacnagnattacttcggggagtgtaggnntatcctttgtcaacaaanttggngggatgctgtctcagtncgcttttagntcnttncacagagggaaaaggggnccttttacatattanngnanttgtacgcactgcactncaagggaaggaaaanangaagggttnnggaacncagggagnnntacaagggggnagagaacggggccgggatggnaggaagaggnaggcggaggcttangggtgtacaaagggcttgcaccccaggg

SEQ ID NO: 2386 - DNA, 320 bp, Homo sapiens
  misc_feature (1)...(320): n = A,T,C or G
gatgtttgacaggttctgcngtactgccctcaaannctcagctgtggactgccanggtgcgcatccctcatgtatgacttttgcggccantgcagcgacagtcacagcagagatgaggaaaattgagtcatcagagcacagccgtgcacacagggtaccagacaaagtgaggctgttctgctccgtactggagacaagtacccctttatttctactgnactttgtcctttctttcttctgtgcttttggttgataattatggggattttggtttggttnggtttttggtggattgaaccnggacctcataaaaaaaataa

SEQ ID NO: 2387 - DNA, 319 bp, Homo sapiens
  misc_feature (1)...(319): n = A,T,C or G
aagaagaaccagcagggncccctgnactttcccgaanaacttggggctggantcattccctggagtcatctccaggatnangcntgcactatatnagtgcaaangntgaaggcactttcaacangtcagcagctactttgggatgtggcgggaagtggancactttggcatcanatnacacactancatgnggacagccaagggcaagcctagggncttgaggaaaacancnccctccacaaangttacaaagcgcanacagtctaaaatacatgctcacggtggctaggggcanagctcanatgcccagtgtgcatgc

SEQ ID NO: 2388 - DNA, 318 bp, Homo sapiens
  misc_feature (1)...(318): n = A,T,C or G
tgaggtggggtctttnaatggtgtgttggtgaggaggtggaggtgcttcagggagcagccgagacactgagctacaccttgcctagaggatgcaggaggaacagccatcgaggaccatggtgagcctggatgtgtggagctgtgggagccatnatgagggctttggntctgacctgaggtggggattccccttaaatattctggggtgtattttggagtataaattggttagtgcntttttttaattncctaatttgngnagagaacananatgaacnacagangattcagagactccacaacctcaagggctaataa

SEQ ID NO: 2389 - DNA, 314 bp, Homo sapiens
  misc_feature (1)...(314): n = A,T,C or G
tttggcaaacactcgcccgccctgctgtcttgtcctgcaganctctaaaaacaaggnccgtgctcctgtgcttancctnctctangcagtcagaatgaagantgcttcctcttgtnttcacagctgnattgctgaaccacctctctctgttggctgagtgttcatgacacctcttcctgaagcaggttagaagcttgnaccctgtgtcatggaagctttggaagtagatnacatcagccccgccttagaggntactgaggatttctttagtacttttgacagtaagctggaaaaggctgtccaacaagcagagg

SEQ ID NO: 2390 - DNA, 314 bp, Homo sapiens
  misc_feature (1)...(314): n = A,T,C or G
gaggatagcacagctttcctanccctaccccnagcctnataaacctagncttgctcnnngctgctatcttacctgcannatncnacntctgcnacgcccactgctgggaacctgaatgcagtcctcactacgacgcacctttctactggtaccntacattatgtacggngggaantcaacgcgcccntccccntttcctttcttaantggtgtgaggnnaatantaactntncctngccnnganctaacaaananaggaacctttgcttcccgtagtgttgggaattacaggagtgagctgccaaaaaaaaaaa

SEQ ID NO: 2391 - DNA, 313 bp, Homo sapiens
  misc_feature (1)...(313): n = A,T,C or G
ttccagagaggaagaaacgtcatcctcctccttttctagatgaggacacctgaggcacagaggagtggtttgtctgacttgtactgacgccatgtagcacagcaaaggtgcatcgtagtgtggcaaagggcacacctactgcccagacctgcttctaagngagtanctgttgtgtgctaaagnttttatatacacacactntgngcgtgtntgtgtgttnntgtgngtatgtgttaaatacttatacattgngntgnacatacagngannataactttggaaggaaaaanataatatgccccattctcctttc

SEQ ID NO: 2392 - DNA, 313 bp, Homo sapiens
  misc_feature (1)...(313): n = A,T,C or G
agcccccaaagaagagggaacccggtccctgcggtttcaggtaaccaggaccccagcangttgtaaacaggtcttttctttgattatccagactcagcaccgagctagccttcttgctgtggcccggtttattggagagaagcctataacgttcgttaagacaggaacttccagnaaaggggcctaanganatatccagccagagccanctgangngancaggtgagccagganacggagccctggacccagctgtgagccacacacatntaccctgccttctgttganaaataaaggtggtgcctccttcct

SEQ ID NO: 2393 - DNA, 310 bp, Homo sapiens
  misc_feature (1)...(310): n = A,T,C or G
cctgttcaccttctgttgctnangcctnctcctaaccacaactgggacttgtctggtgtatnctgtgcaggtnatttgtannatggnatgggagctgccgctgcctgctaacttgtgcaaatggaactgctgtattttccagccaacacagnacaggaagttcctnccaaacaacctttgtcaaataggtcccacttacccctgtnatacctttcttttataactaccgctggtgggtagtgggttacaagggaaggntaaagtgtttaagtacccatcattaaaaataggtatttgtaaaaaaaataaa

SEQ ID NO: 2394 - DNA, 309 bp, Homo sapiens
  misc_feature (1)...(309): n = A,T,C or G
ggctgctttgtttctttatgaggctccaaggagttaagagtgaagatgctgcaggtgactaagaagggctgaggctccaaggagttaagagtgaagatgctgcaggtgactaagaaggactgaggctccaaggagttaagagtgaagatgctgctgtgactaaaaagggctgaggctccaaggagttaagagtgaagatgctgctgtgactaanaaggactgaggctccaaatggaccagctttaccttgaggatgagaaaaggagggatggcctcgccttgngccctcttccactatgcctgtcccct

SEQ ID NO: 2395 - DNA, 308 bp, Homo sapiens
  misc_feature (1)...(308): n = A,T,C or G
tgcctgggtgcttagtgnacctgcggttcattngcnttatcccattactgcantccanaggcacttttgtgtngtttccggttggtaactncctgtgaacagaacagacnaggcaacatggcctggagacanaaaggcnaccctgggcagtcatgtggcaacacactggaaattcaacagctgctgagctccgttactgnacccacgctgtgacgacaaagcaggcatgctctacagggtcaatgctanactggacctcataatgagaccctttctccatgataaaaaaaatatgttaatcaggtaaa

SEQ ID NO: 2396 - DNA, 307 bp, Homo sapiens
  misc_feature (1)...(307): n = A,T,C or G
atgcagccagcccgttttcctccagcacccangcctctcatctcangaaggagtggagatgacacaggacaagtanctagacatttttgtgtaagctgcaggccatttacgttgcagatacacactcattacaagccanttcncaaaggttccaagactcctattttgggagctgttctcaaccagtagtgataaacttctggtgggatagaaagaggatccatcttcaaacctcaagtcttcctggatgggaactggggggaatgtcttcttgtaccattaaagtttttttgttttgtttttatac

SEQ ID NO: 2397 - DNA, 307 bp, Homo sapiens
  misc_feature (1)...(307): n = A,T,C or G
aacttcctgctgctgnatgttgaaggcacntgcacgatggccacanttaaggaanggcnaaccagcanctatcngtaaaanggnccatccagctagcggttattnnacnacnanagtcatatcgangaanagatggggtggctctttacttngaaganccgcactggtcatactaaacattaaaggngagatganaaggctctgntatcacaggtccantggcaaaggagngtgcatacttgaggcccatgaattgcatncaacncaggcancattgcntgacttctccatggtatttgtaaaatat

SEQ ID NO: 2398 - DNA, 307 bp, Homo sapiens
  misc_feature (1)...(307): n = A,T,C or G
gagtggggtcctttgcagngtctgncttcgcgangcccttctgaagggccactgtacccagggggacgccatgcccggtacgcattccgtgggggatttctgcgtggcaggttggcangnaatgtaattcatggnagctgactcggtggaaagtgctcacagganaantngctctttggttccgtgangccnngcttctntgntgntagnacancnccgngacattggctatatgantagatnttatngggggnaacattnccagatctnaagggtngatctcttctgtgatgatgacaaacagcag

SEQ ID NO: 2399 - DNA, 302 bp, Homo sapiens
  misc_feature (1)...(302): n = A,T,C or G
caaggcccatcactgaagggcaaaaccggncccacccgcctnacatacatcagagcattgttcctgagtttccnggatccccncacntacntnanaanttcgacataccganagccattgtntgactaccataatncttggggagaaggccgnatctcagaggactaagacgtggagcgagcactcacccgcttcatggccannacangcgagacccagagttttttcanggatgatgtcancacttttncctttgatntgctgccagnaccgntcactcatncccctacctcacggccttg

SEQ ID NO: 2400 - DNA, 302 bp, Homo sapiens
  misc_feature (1)...(302): n = A,T,C or G
agatgtgatgttacactngtgcaacagacgnancatacaaagcccatgcanttaccaanatccatggaccactncactgatgtaccaaancctaaaaggcatccattacctccacccttacngtgtgctccacagggtacctgannccatcatntattctatatatgggagaaggtcntnancgggngagagntaaaagggnccnncctatgtacctgnnagaaccnaagggaangcggngngcccnctnaacttggngccttgccaatgctcatatcctatatgccctttctcaataggac

SEQ ID NO: 2401 - DNA, 302 bp, Homo sapiens
  misc_feature (1)...(302): n = A,T,C or G
tttaacagtgggtagcaaaacaannccggaaatgcagcantatggtagagagctccgggcctgagaagcagctgccatgggaggctgaggtagtacaaggcaccacactgtggctntcccctgcctaactaatggancctccccactgaggtctacaaagccctncacttcattaagcgagtctgnacaagtctactcattcttnattgcacctctctttgaaggcaccagcgaccgctccggggagncagatatccacggcctcttctgtttggctnagggattaattacaccttttagac

SEQ ID NO: 2402 - DNA, 302 bp, Homo sapiens
  misc_feature (1)...(302): n = A,T,C or G
gccgcaccaagttggcttctggnaatatacagcaaggaatatgatcagtatatttgctcctaaggaaaaaacaaaaggaaggtncaggnaacaagtgcataaggtgcgtcaccacattgtaggngccttcaattcttcacctgcagaatttactgtatcttcagaagaacaattacttcagtgggattttgccttctcaggcgtttttgttttgncttttctcattccttcttgcacagntcctgccctgtgttagttattcagaaagtaataaataaatctaggtatcatgaaaaaaaaaa

SEQ ID NO: 2403 - DNA, 301 bp, Homo sapiens
  misc_feature (1)...(301): n = A,T,C or G
tcctgccttactatcttntnccctgtgnaatgggactggcncccaggacnacagcatggcatgagttatcaactgngggctctgtcttgtgggactggnagtgaagttgattctgactttcttgaatgaagagaaacagnctgataactgttacttgctttggtgtggaccaagatctgtattaacctctctgtattttttaatatgtatatcgagcaataactatctttcctcactcgtggctgccttnctgcacagcttcagtgtgaagcagatgtgaagagggagttaaaaaaaaaaa

SEQ ID NO: 2404 - DNA, 300 bp, Homo sapiens
  misc_feature (1)...(300): n = A,T,C or G
cacttctctccagaagactgngattatnagacatacaccaantgtgctgaggactgaacccaagatttcctgtgtgtacacanccaggcnaggnnanctccctaccagcaacgtncttttntgcttttgctggtgcnaancctacgttncctgccanccagactacagntcnagcngtcctggnccttgnactcaaagatctgcctgcctntggctactgactaggaatgagntcttaanaaannctttgccctnatggggtcttgtangactagacacccatagcttatttagcaagag

SEQ ID NO: 2405 - DNA, 300 bp, Homo sapiens
  misc_feature (1)...(300): n = A,T,C or G
tgttttagatacacttctgaggtagttcngggcaaaggcagctactgtgggctgntaaagtacancnacnnaggaggcacaaccggcnaagngtctaangctctatnatatngcagactatcgngtncattcaaaaacaccctttcntgtactatctgatctngcaattnctttttttaaaaactctgtgancacattnntagaatggcttttgccaggtctgctantgaaaatgtncccatctcancttantcttaaaancctaggggatcgtanantanccagagtcttatgaagcct

SEQ ID NO: 2406 - DNA, 299 bp, Homo sapiens
  misc_feature (1)...(299): n = A,T,C or G
gagtggtcttcttccancacaccctggctnnctaacctgcttntggcttgnctggccctttaccatgcttctgtnngctcagtaanccctcacntcacttcatggaantcgcatngagttcctgcacagtcgtgaaccttctctgtacaagtggcccactngaacttttcaccatgtgggngacacatggngatcctcgctnacctctcccttggctanacanntnttaggacgcaccatcacnacggnacncttaataacactctgctgngggaatgtgtaaaagtgaaaaaaaaaaa

SEQ ID NO: 2407 - DNA, 298 bp, Homo sapiens
  misc_feature (1)...(298): n = A,T,C or G
aacagtaattcttccatggctcaacggaaancatncttagnacacccttgcggggtttgagncaatgaaggctacaaggcattgcctttcccagaacattnccttnccttgcnaaaaagggcnanctatttcggtantcctnntancnggnagggtgtnncnacctngttccttacanctggnttgacggncaggatgggaancangaaaacttacaccctgcggggccccatancagntttcttagagnggaagaatgccttttgggattngttggttttgtttttgtgactaaatg

SEQ ID NO: 2408 - DNA, 293 bp, Homo sapiens
  misc_feature (1)...(293): n = A,T,C or G
ttactaacgagcctaccaccaattntaggaaaatngngacctgngcaacntncttntgactctaccgtnctcaactgttnttgaagatctccatcttctaactaccagngtgcacaggactactactcatgtaacgtcgtgtcccancgatgcaaaggaactgaaatctcaagctgnaaaagcctgcnttattttgataatagcacaaaagaattctagatnggggggncaaacgganacgaatgangactttaaaagaaacaaaccatncatccaagattgagaaaaactat

SEQ ID NO: 2409 - DNA, 292 bp, Homo sapiens
  misc_feature (1)...(292): n = A,T,C or G
acgatgcacagtgtctaaacggccagagcatctggcccnntgtccancgggtattttggatatccantctgacatgaggtccatgaaatcactttgttntgtgantngnnanactgggntagnnnaatttctattcttatnataggnatncgagcaaactgagaggtatttgtntngcacangagntgnggngtgtgccaggcctgggcgtccctccattatttaaacgatgaggntgtggggctgacntncngcaccggaagcactnttctggaaccagattatcttaaga

SEQ ID NO: 2410 - DNA, 290 bp, Homo sapiens
  misc_feature (1)...(290): n = A,T,C or G
ttggtcatatttatggaagngacccatttttcgtaccttcttanctnaagcggnctgcctctttttatactggcaattaattcatataagactttgtntctaccatanttnacngtngangggngntgggtnactgccatatcgccctgtctttctatggagatttactctatccagacttaaaagttgacaggctcacatgggcatttgctaggcaacaagaacttgccctattcacaatttatatgatttccactgcgcttgcaatgaaaataaatgctgagtagaaa

SEQ ID NO: 2411 - DNA, 289 bp, Homo sapiens
  misc_feature (1)...(289): n = A,T,C or G
attccgaagtttatcttgaaggaaanacagctggacaagcagaggaacttctgtctttcggccacatcaaganccctccccaacanctcncccggcagccagcataaactccttggcccaagcccaggaagcatcaggcatgtgtatgaagctcatggctgctccattcaaactattcactacacacgtagccccagacgcccggcccccaagtctccctgtctgcctgccagtttctaaaggtgacagtaatgaagctgtaatggatgggttttcactaaaaaaaaaa

SEQ ID NO: 2412 - DNA, 288 bp, Homo sapiens
  misc_feature (1)...(288): n = A,T,C or G
tctactttacttgctggcnagctcttgctacntggtcggcaccngtnagnctannggnctnantgntcccanaatcatacacaagaatttnnnngnaacctcgcagaggactgcagaccncantgagaatacactttatacncagtggttctacagtggccagactaggagaccaactatgcactancagactccctatagttaggatgaggtgngaagaataagtctatacatccgtagttaatcaagacatcactaaatggganggggggaataaaactaaaaaaa

SEQ ID NO: 2413 - DNA, 287 bp, Homo sapiens
  misc_feature (1)...(287): n = A,T,C or G
agacacaaaatgtaaagagggcgggtcccccgttcttaaggaagcactgcaagaaattgaatcggaccctgaacacttcccacgtcaaagccaccgagaggcagaggtgcgacccgagaaatcactggcacggactgtcggcgctgggctccggatgcgcactcagccctctgaaaggctcggacattgcagtaccactagacccgggtttgtcccggcgtcggaggcgcggccgggccccgcccacgcaccaaagcggntgcgcagcgtggctaccaaaaaaaaaa

SEQ ID NO: 2414 - DNA, 286 bp, Homo sapiens
  misc_feature (1)...(286): n = A,T,C or G
ccgaaactgttgaagggagatgngngnctgnctatgnaaaagntctncnaatgctganactntcccaaaanaagatngnttnatagctctnanncctttancctacaaatgacttatagcagatatatgangcgccatcatgacccacccttggcagcttaaangnggncantatgcatnntgtgcattacaggcaaaacctaccttattaaattcatgttcctatcgtgagtgcagactggttcctcaaagtcattgttcagnctgtcaataaaattttcctagt

SEQ ID NO: 2415 - DNA, 285 bp, Homo sapiens
  misc_feature (1)...(285): n = A,T,C or G
agctgggtttggtgctgaggtagtaccctgggccagcagccataattacttcttgtggaactctcaaggtcggnacaggcaataanctnacgnnactanaaaaacacgggacgcacggacgnactccncttgnactggacggacngaacttcacaaggggnncgtgttcccctgnccgttcnttcatnagtnatnntcacggaggaaggagcacgcctngggncctgactgcgtacagacanggggnggctcaataaaattgcagttgaaatggaaaaaaaaaaa

SEQ ID NO: 2416 - DNA, 285 bp, Homo sapiens
  misc_feature (1)...(285): n = A,T,C or G
attctaggtgatgtgtctttttcctccctgaatttggantatggcaggcttnaggnaacagaatgangattgacaatgactacaccaactatnatttatattctagcttggtacacaatangaacatatagnatggatangtgatnatacnactanacctataaactnataaaatgttacaaatgggatgaagcttacaaatgtggcttgacttgtcactgtgcttgttttagttatgtgaaagtttggcaataaacctatgtcctaaatagtcaaaaaaaaaaa

SEQ ID NO: 2417 - DNA, 283 bp, Homo sapiens
  misc_feature (1)...(283): n = A,T,C or G
gggggcagcacaccccccaanaagnccaagttntattttccaggccggtaccaggggatttaaggggtntnggggcttggaaaaaaatccctggggggtttttggaaanantggtttccaagggncccaagntttnaaaaactttttttngatccccnnaagnncccnctttttttttggggggganggggggggggggnngggttttttaaatttcccccggttttntttttggccnttttttttaaangccccctgggggaanttttttttttcccccctt

SEQ ID NO: 2418 - DNA, 283 bp, Homo sapiens
  misc_feature (1)...(283): n = A,T,C or G
tgctgcaccaatatggtggctcacactttatacttctgcagcactcaaggaggatgggcaacggtaattgctgacccgagaggnacagcctcgccgtgagttccagggtaagtacngnnanactgctggttcatncnaagaanaaacttggcangagcnggntttncaatnggcnttgngntccncttacangngcantnacncagaanaaggngactaacagggtnagcngattcaaggngcagttggatatntatgcgaggggtgaggctaacctcgggct

SEQ ID NO: 2419 - DNA, 282 bp, Homo sapiens
  misc_feature (1)...(282): n = A,T,C or G
ggacaacattggcctgcagnaanaaataggcatgggcaaggctgacatgaactgtgctctgagacaggcttcactctgcagcccccatgtgctgggatcacaggcatgaaccaccaggccgtgcacctgtaagtcttcattgtgcaaaagattgacagatctcccacttgttctccagtagcacctttgccacaatccttctgttcaagtgggtgcacagggagatgatatctacacanaanccatgcagtggaggnagtcctaggtgcttgccatgcacag

SEQ ID NO: 2420 - DNA, 282 bp, Homo sapiens
  misc_feature (1)...(282): n = A,T,C or G
gcaccatggaacccttttgcaaaggtacacacttncctaagcacacctgtttggcattctgcngcaangttgcgccaggcaaaaggacactaattttctcctaannnctctccagagtgcaaagaaacccagctccttcaatggcacccacaggaantttgccacaggttngncgagcanctgntacctgacgatggctcatgtaacgaaatctatgcagaaaggctntgaggagaaaaaacattntataatggcgccttctgaaaataaaacgttccaaaa

SEQ ID NO: 2421 - DNA, 281 bp, Homo sapiens
  misc_feature (1)...(281): n = A,T,C or G
tcgcctccttactgggngcttacaccaccctctatctgaganaaatantcgnctgcttatgacatttatgtaantanaantacacatncttttgattaccaagaaagncatnaaaaagcacaacgagggcgggggggggngggnntactntattnngtacgnnnacgttcntttanaaaaaggacggnatagggngcagggacgcttcnatcngatngcagnnacgcactttgattgctcgggccctcttagagcatgtaggtagaaaagggcttggcgta

SEQ ID NO: 2422 - DNA, 280 bp, Homo sapiens
  misc_feature (1)...(280): n = A,T,C or G
gaaacaggataagtagtacaaatgcggnagccaaccgaaggtggnctaggcactgtctgntgttgaaacacannacacccaagcccantanactgncatcccgggaagaaggctgcttnctcttggcttgcgtcctgtccccctttccaatgacagcaaaatccttggactanctctagttacagctgttacttagatggaacccaagttttgttttttgtttgtttgtttgtttcttcccttctggtaagaacatggctttaaaattcaaaaaaaaaaa

SEQ ID NO: 2423 - DNA, 279 bp, Homo sapiens
  misc_feature (1)...(279): n = A,T,C or G
gatcttgcccttggacactnaagcagtagtncagcattggcactgnangctatggatttctgngctctgtggnggataacnctccacacacatgtgtancacaagacacctggncnancccagccttccctggttngccaaattatgngtcccatgtcngcacgtcntgactgnttctgnncctgtccncaggctnnggncagagacatgccntgaaatatgtactgnggacacgggtacaggngtgccacgcaatanatntttgtcaaagtctaaaaa

SEQ ID NO: 2424 - DNA, 277 bp, Homo sapiens
  misc_feature (1)...(277): n = A,T,C or G
cccgtgctgcagtgtgtagctgtagctcacatgnaactcctggtgatactgccatagcctcttagagtcagggtcacaggtatgtttggccacacctgactgaggagagaatattccagacacagtcacagacacgctagcatcggaactggtggaccaatggacactagcatcttcttatttgtaatttcattttctgtagttcaagtgtacctaancaacagcattccaaaacgattacatggcaaattcttggaataaaactccataagcttta

SEQ ID NO: 2425 - DNA, 269 bp, Homo sapiens
  misc_feature (1)...(269): n = A,T,C or G
accatggatgaaaaagtancttcatgtggcctgangccnggtacantgaccgncactactnagctgntgactggctagctnttnancanagactacncanaatttaaatctactgccagctagaacttctgtnacggctctttatgtcagccagangaaagngngcattccccctggcagctcttgattctgaatctgttactacatttaaaaaantggtgtnaatagatataatcaaacagaacaaaanactacttggcataatgggt

SEQ ID NO: 2426 - DNA, 267 bp, Homo sapiens
  misc_feature (1)...(267): n = A,T,C or G
tgaggggagccctttcttggaggatctacgctgggtgtttgtctctggagcccggggatgcaacaaagccttgagaggcanttcctgagtcgattgcgcagtcttctgaagaacccaatcttcanagtgggagatgatgtttccacggcaacgtcttcctcagggattctaagatcttattggcatcaaaccccatgccacagagcatgtctatgatggtgtaatctgggaagctatcagtcggaacagttacatcacattttctga

SEQ ID NO: 2427 - DNA, 267 bp, Homo sapiens
  misc_feature (1)...(267): n = A,T,C or G
tgtgcacagggggaggaagtatacnatcnactcgcaccaacttaagcactcaatgattacatgcagagaggccnccacggcnattagaagggctttggtgcacacagactgtacagtcacttcctnaagnagggttattgnttctgcaaatgaggnnagagggaanggaggnatgcatgtgtactaccttgcanaagccanacntgctttttcgcttctgctgngaaacancctttgngtgcccaacttgnatgctcatgggaaaaa

SEQ ID NO: 2428 - DNA, 266 bp, Homo sapiens
  misc_feature (1)...(266): n = A,T,C or G
gcctcctacacttgctggctttncnccccnatgaganggggcttcgctaacccatgaacccatcattggaccaatcattgatgatgtttcagtccttagggtgtgctccctgcccacaggtcccactgaacactgccgctcaggggacaaaaggctccgtgaacgtatagggtatatttaagangctgtcttagngtcgctactgctgngataaaacaccatggccaaagaagcatggggaataaaggacttacttggtttaaaaa

SEQ ID NO: 2429 - DNA, 262 bp, Homo sapiens
  misc_feature (1)...(262): n = A,T,C or G
tactgtaacagtatactttntacagaantnacnnttatttgaaaaaatgaantactaccaggcgcagggnactgaaacannnaaaggtaggacttgctccaattgnganccgatttgactatgcncagggcngttaaactaantatggaccanctactagnaccataatactgnggatgccttcggagaggnaccggattntttncctgctgcccantgcaaanagntagacacnctaactctggagcaaaagctcttcagc

SEQ ID NO: 2430 - DNA, 262 bp, Homo sapiens
  misc_feature (1)...(262): n = A,T,C or G
gggtttggggctgtggtatagcctggggcatgngccatanttacttgcttgtgggaantctcaattgncggacagtgtaannatggagtgggtncataaaaaaagtctaaaaaaagnatggaatttctgngggggagtgggannctggncgtggnnnaataaactncgcttantggtagacagngaanggnnngngacctctgntgggaagatacatgttcccagaaacaggcaggacnaggggggttacatgggaagctca

SEQ ID NO: 2431 - DNA, 261 bp, Homo sapiens
  misc_feature (1)...(261): n = A,T,C or G
acctgaggtgaggcgcaacntnttggtggccggcacagggaacccaaggtatcttgnggattcagaactcttntctgaggaacggcggtaccggttagttctcccaaattganccccggnaacaagggaggnatatgttnttcttgcccgnntacccnntgggggtagctctacagcgtttttgtttcgtttttttgtnattcctgacctctgcttttgtttgataagaagcnagctcangcgcggctcaaaaaaattctc

SEQ ID NO: 2432 - DNA, 261 bp, Homo sapiens
  misc_feature (1)...(261): n = A,T,C or G
atagcttccctacacgtcaaggtcnaactgtgctaggctcaccgccncactnccacgcctaancagtcttgaacttgatgaacacaggnanaaaacagggttnctctgtaccangggtgactgtactgaaactcgatccatagaccaggctggcctggaaatnacanngatctgcctgcctttgcctnctgagttcctgagtgctgggattgcctcctgtgcaccatcacgcccagcctaaataaatcttaaaaaaaaaaa

SEQ ID NO: 2433 - DNA, 259 bp, Homo sapiens
  misc_feature (1)...(259): n = A,T,C or G
ccggcgcctgtctttcagcagcagntnatttgccatnnaagcacacgaggngactnccggnagttncccagaccccgnagaatgtatnactctcctgnaaagacgcaaaggcctttctgactggccatatgaataaggcantgnatctncncagnaagcngtaagnggtggttctcttacaaaagtaacantnctnaccaaaagtnacttttccaaaaagaagtatgnattcattattaaagttgttcagaagggaaga

SEQ ID NO: 2434 - DNA, 259 bp, Homo sapiens
  misc_feature (1)...(259): n = A,T,C or G
ctgacgtgcaaggaaacagacacgtgcnanntcccngtgtggccacacttttgcacacggncgtccatgtccgatgatggagtccnatgctntcgggaccatcctncacncagttactgnacagccggggcaataaccggcaattaatccagtncctttgtgacccttgnctgtgnccacatttntaggagngnggnctgcggtgggccatgccccgacaccacaacatgcactacaanctgnggacaaggagacagtt

SEQ ID NO: 2435 - DNA, 258 bp, Homo sapiens
  misc_feature (1)...(258): n = A,T,C or G
gcttcagatctcagaagaacttctaatgatgagngaaaacacaacaattactaatagaggccgtgccgggctctntgttntccctggnancnacactaacannagccacctngnaantgatgcccttgggnggntccangtganctgngacggaacaaaatcatcngctgttgccaggtgtgaagtcnaggttntagctantatnaacacttagnctggcttnacgctaggccttaaaatccagctgatatgcctcgg

SEQ ID NO: 2436 - DNA, 258 bp, Homo sapiens
  misc_feature (1)...(258): n = A,T,C or G
agcttgcacaacaccttcccgcaccctcacaagaagtagtccttgggtaaagcaggctcccagggcttcctgatattctggggctcctagtggccccagcctgttccctgaagcttcctgtcccatttccagactccagagtgaacacttcctccttgggtctagctggttaagccacatataccatgaggcaccattccagccatcactgtatttacagntgtttggtcatcattacacatttccaaaacaaaaaaa

SEQ ID NO: 2437 - DNA, 257 bp, Homo sapiens
  misc_feature (1)...(257): n = A,T,C or G
acctgagggcacccgnngtagggtgggctgccctacanggcacnngtgcagggttggtttcccttggtagtgacccttaagcagaaggcatggtggggtacccnggctntgtaanaaggaaaagaatgcgtangtncaaaaggacngnaccctgagcttggaggnggnttacngncccaanttgtaagagggnccacctggaggttggaaagtcccggcncacagtagatactcaaataaataatttttaaaaacag

SEQ ID NO: 2438 - DNA, 255 bp, Homo sapiens
  misc_feature (1)...(255): n = A,T,C or G
acctgaggaagtaataanaggcattantactaaggtcatctggaggagcaccgggcaaatgaaacatactaggtaaaggacgggattggtacaacaaggacagtangtnccaagcangcatagncaattggncaagtgctacccccaacctccanctcttctctgctgccctctataggcagaagtggcaaatggtctttatgtggtcccaatgcaatcaaaaattaaagctggctttggttggaaaaaaaaaaa

SEQ ID NO: 2439 - DNA, 255 bp, Homo sapiens
  misc_feature (1)...(255): n = A,T,C or G
tccgctgctggggtctccangaggnaaaccctgtantgaggtcacaggtctgacttaaagaacattagaggcatttccaggcaaccctgggatgngcagtattagacgctgnacctaanngngaacctaccnacttananctgnncagtacagnnanggncagtganctggncttcaaacaaaccantctcctgtaagccctaatctnacctgtttacccnntgaancacactgaaactttactgctatgcactt

SEQ ID NO: 2440 - DNA, 254 bp, Homo sapiens
  misc_feature (1)...(254): n = A,T,C or G
gtcaaccatactgcagatgaaggtcctacgctagaagggtctgcncanggacaggcagagncccttccagatctgaanactatncanncagctagcaccaggcctacnccaggggacaagacctagtaatgaagagaccanggctccctgttntatcacatngcgcgattctcattgcttctcaaccttggctgcctggaagaaccttatctntacatagcatacanccantgagtctacactaggacaaggca

SEQ ID NO: 2441 - DNA, 253 bp, Homo sapiens
  misc_feature (1)...(253): n = A,T,C or G
ggcatatgcttgaagtctatggcacatgctaccacgtnccaccgaangacaggatgancngagggccctgcagnaccactgcnaatgtgcaatgcctctgggtttcatggnttttgtntgnttnnattntcgntnttaaagaatttataagaattnntgcnnttcaaagtncnannctgtgaccaacgtgctnttcttctgggagaacaagtgcttatcactaccgagccntncctccagaccctcatggaga

SEQ ID NO: 2442 - DNA, 253 bp, Homo sapiens
  misc_feature (1)...(253): n = A,T,C or G
agccgtttatactaagncccagtaggcagtaccangtactcttcaagnaatcgtggggagtctggcggctcgctctccatcgcgctcccccacgggatgatctccagactgccgttcagtcctatgagtaactgncaacattgnntntgtgttctgcacatgcaagttttgaatgatgatggacatttaatacctggtatantttcaaacaacgaacggaaccnnaggggggaggatggtccacctattcaag

SEQ ID NO: 2443 - DNA, 253 bp, Homo sapiens
  misc_feature (1)...(253): n = A,T,C or G
gagggaagacttgcatggctgctggnngctgtggaccttttgnagcaggggtacatttgggaggcacagnagccgggcatataatatacaaggacagcacagnaccgggaagaaagactgatgaagaaaagtaacagcatgtattgaggtaatgggagcacctactgggaacacgcgggagaagctagtatcttgcagggaagccaagatgagggagagtctttttaaaataatccaaatactgagtaagaaa

SEQ ID NO: 2444 - DNA, 252 bp, Homo sapiens
  misc_feature (1)...(252): n = A,T,C or G
ttactatatcccaaggtaaatccagcaccgggctcttagctgntactgactccntacgaaagtgctcatacccntatacagcagcaagcaatactgggcataaatagcttctcctttgcattcttcattgnttataactacatanaatccattgcntgngnnacagntttnacatcggactcannctcattctatgaaaactgcactgtgtttntntagacactaaacactgacagaactaagagatgctaa

SEQ ID NO: 2445 - DNA, 251 bp, Homo sapiens
  misc_feature (1)...(251): n = A,T,C or G
cctagggaaccaactnttgcctgctnncctgggcctgtgggggagccntggggtggttccatgaggnncctctgnctgtcngcanaaggccanctcaccacatcaggaagtggtggttccattgcaaatgctggctccccagcgngtggantntngnagagctccaagagccnctgctgactgctggaatcatgctggntgccctgctccgatcctgactgntcagcttgcngagctgggcctgaattacc

SEQ ID NO: 2446 - DNA, 249 bp, Homo sapiens
  misc_feature (1)...(249): n = A,T,C or G
tgtagagtctacattgnactganagcatcgggaaagctctctggaccagcatgtgcacttcacctgatgcttatggaagacacacagcacacacaggaaaacacctcctccaggattgctctaggcctcagaggaattggccagagcttcgaagcagtgcgggcagggccttcctgacattgtggcatgacttctgcttgctgccttctcccataaaacagtgattcctccgtagaaagcactcagcag

SEQ ID NO: 2447 - DNA, 249 bp, Homo sapiens
  misc_feature (1)...(249): n = A,T,C or G
acctgatgtgctgagtctgggaccgcgggtatctccgggcagcctntgctaatgagctcttagcaggacaggggaggagacagattccagctgcccccgcatgccagagcaccaaccgctctgttccttacaagcctgccaggtcccagctctgcttccctgaccccatctgcagtcgcaagcaagccccagccctggaggggctgcaccctgcaaccttcccacagctgtctcctttggataaaaaaa

SEQ ID NO: 2448 - DNA, 247 bp, Homo sapiens
  misc_feature (1)...(247): n = A,T,C or G
gatgacttccttgttacgcggacttgnttgcctnagnggccttacctgatttgccctnnaccngtacctncggtttncagcgcnncattggtcaggnatgcagggaaggcgcttncttgttgctggnacactgtaactcactancctcaggtgntcngctgctgcnctccactccagncacgcgnggaaagttttaatccctttattttatttacataaacattaatttngtacattaaaaaaaaaa

SEQ ID NO: 2449 - DNA, 246 bp, Homo sapiens
  misc_feature (1)...(246): n = A,T,C or G
aaggacagggcaatgcaaggcttacaaaataaaagttacatggnaatcccaggctcagcaacacaagtgagtaacatggttaataatacttcttaacagaagtataaaatgctggttactaacaaagctacagggtattgttgcctttttgtttgtctaattcaggtttttaaagatctttgttttgctgtgaatcttatggttaaaaacagagagggattccatgttaatattgaaaaaaaaaaa

SEQ ID NO: 2450 - DNA, 246 bp, Homo sapiens
  misc_feature (1)...(246): n = A,T,C or G
cgttttatgcgatagaacgccctgttttncccatgcaaggtncaactctncgnaanaaannctcactgggnacaattttgcaagtacgagttgtactgctgacacaggcaaatggnatgctgnaatacaggcatggnaagctcaggcagccanaaatcgcaggnangnaanggcaagcaaggtaacatgatntcnaacctcaaaggggactttactganaagnccacttcgcgaatcaataaagag

SEQ ID NO: 2451 - DNA, 245 bp, Homo sapiens
  misc_feature (1)...(245): n = A,T,C or G
aaaaaggaacactctgtggggtacgtggngntcngggataccctgggttactcagaccctgtgctgaanacaagtggagctggngaganggttcagcagngnagacacgctctgnctaangacccaagnntgacgccncagaaccnacatggtaggagagaantgactcttgcaaggttgccctctgacctctccacggntgtgcagcaacagagggtacatgagcacacgcgaaattaatttaa

SEQ ID NO: 2452 - DNA, 245 bp, Homo sapiens
  misc_feature (1)...(245): n = A,T,C or G
aatgaaacagggtatgtnccactcatnaccatttctncagtctgaagcatgnantctacatttggagataacaattccaaagtccttgcaaactgaangactcanagnaaagtggtatgaaaaacagctggncatagatgcaggacacaaacnatttgnggcagtgtcctgtaatatctgtggaatgctctatacagcttcaaatccaggaagtatgaancacagnacctgcttttccacaacca

SEQ ID NO: 2453 - DNA, 245 bp, Homo sapiens
  misc_feature (1)...(245): n = A,T,C or G
gcccttgcttacactgcaaacngcangcctgtnggaccnngctgtccctaaccancnggaggnctagnnatacnnatctatggactgaancantgtttggncnangaangcccttagttgatcnccagcactgaaaaaaaaagtntaaaactttttctatctaaaaatataaaggtttgggactntatatctcancgcttgctangatgcataaggctggggattcaatccctattaccaccaaa

SEQ ID NO: 2454 - DNA, 244 bp, Homo sapiens
  misc_feature (1)...(244): n = A,T,C or G
agtttacagctcttccagtgttatattaatgctcgcngcacaaggcataatgnggcatgctatctgttttgagagngngnattactgagtancaattggccgnnatangtggaaanatcactgnaggnacaagcgnntattgaggtggagtatgattatgagnatgacgcanaggccagaaangattgtgancagaacaaggggagcgctacctngctggntgatgaagtaccaatgatgactg

SEQ ID NO: 2455 - DNA, 242 bp, Homo sapiens
acctgaggtttaagcaccgttggactctcagaagtacatgcacttccctttttgtgcatcagtagcaagcgataaaagcttcctttcatagttatgaggaatcatcaagttactggctggcagtacacatgcttggaagagctccagttattgcttacaaactggaatcccaggggtccatagccagtaaacaaacaagccgtcgtatccatggtaacagcggcttaacttttcaatgcaca

SEQ ID NO: 2456 - DNA, 242 bp, Homo sapiens
  misc_feature (1)...(242): n = A,T,C or G
agctaggtgggcattcagctgnnggcttactgggctgcggancctgganaatgtaatcnacgtgcactgatgngcaggaaagaacagaactntggtttcattcacaaatgacgtnttaccctcctgccannaggatgncgaattggtatggtattgcangggcaaanaagaagggctgattacagggtctggacttttccttttagagcaaacgaagcttgctcttttttttttttgcaaaa

SEQ ID NO: 2457 - DNA, 241 bp, Homo sapiens
  misc_feature (1)...(241): n = A,T,C or G
ttcagggctcgctctnggntgngcgantagcantgcncagcacccttgacctgtaacacactacgctacgccacattcctntacctctgnggaggnngngctactgcctgtnaanacanntnganggaacagnaccgangccgnacctnacactaggtatantaggaaccagaatcagggtggtggtgcagcgctcgctggaactagataaacccagtcttcttctgtgcaaaaaaaaaaa

SEQ ID NO: 2458 - DNA, 241 bp, Homo sapiens
  misc_feature (1)...(241): n = A,T,C or G
ctactgcactgtcgccgcccctgcgnaccaggnntggaaacaacctgnctnccgtggaatatccntncanaccggcancaatcacanatnaacatggnntnaaaatacctgcggaactccgggatcgctttcttctgtaancgnactgctcgttgnctgctgctctnccganctnnattagaacagttagcaangnagggaaaaaggcttttgcccngatgggattttggaaaacatttct

SEQ ID NO: 2459 - DNA, 239 bp, Homo sapiens
  misc_feature (1)...(239): n = A,T,C or G
gagtgttggtcaagtctggaccagtgtgtcctgtctggtggggctgtggctgnttctgctgcccctggctctgcnccanctgctgctgnttctgcccccgctgctntagaggtataagaaagtatgaggaancaaggtaggtanccccagggagncngnatgnacccacntgggtatnctgnccttgtntgattaagttnctgctcccctggaaataaagnctttttatgtatcttgca

SEQ ID NO: 2460 - DNA, 239 bp, Homo sapiens
  misc_feature (1)...(239): n = A,T,C or G
agcaggcgcgccaaccctggtagtggatgcagctttgggtactcanaaacccactgctttctggggagtcctcgaacaaagnaanttcccactaactgaacaggaggtgttntatatgaactgtagagccgcctacttaactatcttcaaaagcagcttggnaaaacattatttctaaagatcaactttacctaggtaaattttttgaagttgaacattttctcttatttattaaagtt

SEQ ID NO: 2461 - DNA, 238 bp, Homo sapiens
  misc_feature (1)...(238): n = A,T,C or G
tgaggcctagaagtaacagcacatgctgacagnctgacactattnaagcaccctgtggaagactgcagcttggtggaacggaccctccatctgccaaccacatactccatgacaggatctttccacagcatccaactgtgaccttgtgcttgtacccatgtcatccagcacagccagagtttcttcaactatggattgaaggtttggataaaattaatttgaaactacaaaaaaaaaa

SEQ ID NO: 2462 - DNA, 234 bp, Homo sapiens
  misc_feature (1)...(234): n = A,T,C or G
catctgcagtatcccaggggatgcactgaacagagaacagttcagcctggtacgtgcccgcacttcaatacaagcaacanaggaaacaagncatcgtggnggagactgcttttcctcatnngattctatattgacctgaataaatacnacttaaatacttgctgaagaaggantnganntgtaatnccttgtngnatgaactactgggcactgcctctgtcaacctctccaatg

SEQ ID NO: 2463 - DNA, 234 bp, Homo sapiens
  misc_feature (1)...(234): n = A,T,C or G
agctacacagggaccaggctgcantttctcctcnccanntncaatggcagcccattgcattaagtggagacatnancgantattgataccattgaatgtgnggatnggataccctgtggacgacatggggaccnatattatgatnanggacacttctgcggactgactgtgtacagaggttaaanatncnncatntgnattgacacctgggttcaaactctgcttccgctctca

SEQ ID NO: 2464 - DNA, 233 bp, Homo sapiens
  misc_feature (1)...(233): n = A,T,C or G
gattctccttttagcctgnaaaagtcttcctgcaataattccacatttaaaaatcatatattcctagaagcactgaaatgggggctggtgantatggnncnccgggtnanagcaccngactgctctncnaaagggccngaggnnatnncccaccaaccacgnggttgtggtcacaangcatttgcagactngatctgacggccctcttctgnggtgatctgattacagcccca

SEQ ID NO: 2465 - DNA, 232 bp, Homo sapiens
  misc_feature (1)...(232): n = A,T,C or G
cggtgtggagccccagaangnaaggncatgacagaacaatgaggttncgctgatagtncgccccgttgncntntatattgaggaacangggatacattnncttanttngagggctagcttttgttgtaatgaacacantttacccctttttgattttggatttaattttttcttaaaataatgcaaagcatggagaacantataaacactangaaacaataaaaagatattt

SEQ ID NO: 2466 - DNA, 231 bp, Homo sapiens
  misc_feature (1)...(231): n = A,T,C or G
acaagaaaggtcgagcagtagcatgnactcangncttaactagtgcttgctgntnttccnnaggtacgcacttggnatctgaacactgacatgggggttgngctgacagcnngcacgtaaacacatctntaggtgatctagacaacacctttggcctccanggacatctgcnntnatgtgtgtacactcatacatagacaaaatacagatntgtnactaaaaccaaaaaaa

SEQ ID NO: 2467 - DNA, 230 bp, Homo sapiens
  misc_feature (1)...(230): n = A,T,C or G
cggttctggagcaagaaacgccctcaggnaaggccgaggcaagtggcttctggaatatacagaagaatatgatcagaatatttgctcctaagtaaaaaacaaaagcaaggtacaggaacaagtgcataaggtgcgtcaccacatgtgaaggngccttcnnttnttcncctgcagaanntactgcntnttcncannacaattacttcagtgggattttgccttctcaggag

SEQ ID NO: 2468 - DNA, 230 bp, Homo sapiens
  misc_feature (1)...(230): n = A,T,C or G
agcacacagctaagggcgcanttcnctntaggggagaaccttgttttngttttaaaaagggatgcataacnngnggtctctttacccatcagggnacnaannnccccaaggtaacagaggtgctgaaacagagcacacagcangggcgcaattccctctagggagcccttgtctcgctttgaaaagggatgcattacaggtggtctctttacccatgctaaaaaaaaaaa

SEQ ID NO: 2469 - DNA, 228 bp, Homo sapiens
  misc_feature (1)...(228): n = A,T,C or G
aggtgctatctatatctctacggccaggctaccaccatcttcacgaatccagctgcacctgcttgtgagcaccctttcaggatgtggcctgtggactgttgacatcccttcctagatggagagactgacaaaggtctttggaccctcacgtgagtttccagctgntcctctcagccatttgtaggcaatcatgccctaattgctccttgtggggtggggttgggggtg

SEQ ID NO: 2470 - DNA, 228 bp, Homo sapiens
  misc_feature (1)...(228): n = A,T,C or G
aaaaacttcttctgacacttggatggggagctccgtggtctgccatgcagnacaacaagtatttctactttacaggtgctgtataaggctccctccaagagccttgcagtgcaaaactcttatttctctggaattgaaatttactttggaaaaaaacgtatattcatccttctcttcctaaaggataggttaaatatttattaaagacatttacgggaaaaaaaaaaa

SEQ ID NO: 2471 - DNA, 227 bp, Homo sapiens
  misc_feature (1)...(227): n = A,T,C or G
acctgaggtggggtctttactncaaggagcggcacaagcaccatcaccaccgcggctccgatggtgaccccggcgcctgcgttccgggcgatctcaagcacaaggacaagcaggaaaacggcgaaaggagcggaggggtgcctctgatcaaggcccccaagagagaaacagcagatgaaaatggtaaaacccagagagctgatgattttgtcttgaagaaaataata

SEQ ID NO: 2472 - DNA, 224 bp, Homo sapiens
  misc_feature (1)...(224): n = A,T,C or G
aaatcagcacatgactcnacnatgtctattaagngggaatnntaaagacaaaaagnatgggaanctnannctanggcncnnatgagatgctgtnttctgcctcaaccctgcaagcactggccagttctcctgaatcctgaagaagaggatgattttgattttgaacagggacnatggacntcnactattacancnatggnccctgggaatattggaccgactaa

SEQ ID NO: 2473 - DNA, 224 bp, Homo sapiens
  misc_feature (1)...(224): n = A,T,C or G
ggacaggaatgacacagccttgcacggnctggnactgntggttggctctttcctggagcacggncncaggcngatagtgacacaaacggnnacccttgacccacccacagaaagctaacatacanttctgnactgtgctgtgatgccttcaggaagagcacttgacagtgcttaaaactcctgccaatccactgttgcataaataaaagtggggcctgaccgaa

SEQ ID NO: 2474 - DNA, 224 bp, Homo sapiens
  misc_feature (1)...(224): n = A,T,C or G
tcaacacccctgctacaccacccaacttaccctggtgcattggnacatgttctncaagcttcggaacctctggngggcctgcannagcancagcagcagccccatggcagccgtggcctgttccccccctnnaaacttnanccccttttngggcncattcccacccaannancangngncctggnttccngcctttttccccnacacctttcattttcaatggg

SEQ ID NO: 2475 - DNA, 222 bp, Homo sapiens
  misc_feature (1)...(222): n = A,T,C or G
cagcaaaaagacagatncactctgtngacntcatgcatagncactntcgngnncanggcgagatggctctgtagnntaagngcacantgttggcaagcctgacaacctgggtattaattctgnttaatncacaggggtagacaacagtngtantctgaccttcacgngtgctgngacacatgtgtgcccccccatacacaataaatgaatgattataaaata

SEQ ID NO: 2476 - DNA, 221 bp, Homo sapiens
  misc_feature (1)...(221): n = A,T,C or G
ggggggaaagaaggaanagnttttngggtggagagagaacganaanaccnagnagaggctagagagggagcgcctggtaacaagagcagctggagcggcagcggccggaaagggagcaagnggagtgggagcgagagcgcangatgtccaatgctggcgcgcgtgtcnccgaggncntntggacggagacgattcncacggnggaaggagcacgccgacag

SEQ ID NO: 2477 - DNA, 220 bp, Homo sapiens
  misc_feature (1)...(220): n = A,T,C or G
cagcccatctcttaactaccnaggggctacccggtattcntgtaggaccggnnnccggtttncatacaactaccactgggaaagaatgtcatnnananacacnctgtataatatngnataacactcactgtaagaactggaacaanagntggaagccagggggaaatatggncagtgtatgttccacagctgcaatnnattaatacctgaaatgtttgag

SEQ ID NO: 2478 - DNA, 219 bp, Homo sapiens
aaagtggagagttatgtaatttctaccgaggtcatggtgaaatttagctccttcctgctgtgcttcaggactcttgcttcaaagtctccctaggaaggacgatcttagaggatacagatcatccatatgcctataaaaggacaggattatgtaatgttcacttcatgttgcagaacagactcctccctcctctaattttacaagtaaaagtaagtacat

SEQ ID NO: 2479 - DNA, 218 bp, Homo sapiens
  misc_feature (1)...(218): n = A,T,C or G
ccactcatcccagagacagtagctnttgcctacctgnctcccttgcgncgctgtcttggcttacgttgcnacacttggagnnaactgcctgaganccttggcacttccatgtgcacagactgtcgcactgtaacaanctgtgtggggaaattgnagactagccgnactgaaaaggtcatacacattacacatngctctttcttactatgctcagagaa

SEQ ID NO: 2480 - DNA, 217 bp, Homo sapiens
  misc_feature (1)...(217): n = A,T,C or G
catactccagtcttgggngcctggcctgtcccctgtgcccagaaccagtaaatcggcttcccctgccccagtgtatcctcaatcaggtaactgcgggtgctatctatcatgctcagaacgtgcccccacccagcccaggggaaataaaggtgaattcaaaaggaagccaagcctccaaccaaattaccagataaacaaagaagcccaaaaaaaaaaa

SEQ ID NO: 2481 - DNA, 216 bp, Homo sapiens
  misc_feature (1)...(216): n = A,T,C or G
ggcacatgccactcctgactattggatntactgtatggcanctggagcacttctgactgcngctntcatgcggctcatngacactgtgctcctntactttcttacacctttnccnggcgngaangacncnantgcagagctgaacattcaatgaattacatggaannggccnntcaancnctgcctcntttgctcaagggcgagggctctctagat

SEQ ID NO: 2482 - DNA, 187 bp, Homo sapiens
aatcaggaaccgctgtgaactagaactttgggtgattatgtaccctccacgtggtatgctggaaactgtaatatggtcctctgcaagcagcagcaagtagtcttaaccactgagcatcttcccagcctacaaatgtttgatgttactaagaaatgaagaagaagaagaaggaagaagaagaaaaaaa

SEQ ID NO: 2483 - DNA, 214 bp, Homo sapiens
  misc_feature (1)...(214): n = A,T,C or G
cctcctatgcggaaggnagttgaanaactcccgctgtgcacatgtgctggaggaggagnacgactaggnacgaacctnntatnggcnnngcntaaaggaacaggnttgcacgacgctatcctgntattctgggatctangcttnacctctttnagctgctgnacccttcttnatgaaatgaggtggaaagcatctttctcagggcgctcttgtg

SEQ ID NO: 2484 - DNA, 214 bp, Homo sapiens
  misc_feature (1)...(214): n = A,T,C or G
ggctcccttctccgtntcgnanctgcctgtgtacaaccatgccttccaccatgacggtancggaccgnacctntgaaactgcaanccanncccaattaaangttgtccttttatancgtagggacnncanggtcaatggtcgctctcatnnacaggcactttttcctatacaaantatgcgcnccangttgtacttgggtgctcaaactgaaaa

SEQ ID NO: 2485 - DNA, 214 bp, Homo sapiens
  misc_feature (1)...(214): n = A,T,C or G
gactagcagacacttatgcctgggggtatggcgnaacngantacccntttcttantancttgtagtcangagtgtgaagaatgagcaanannncctgttaataagacatncannagganggtgantncaccgnantnntaaaaacggtcctcctcccttgcaacaccgaggctgctcaaaaggactactaggaagctggctttaaaaaaaaaaa

SEQ ID NO: 2486 - DNA, 213 bp, Homo sapiens
aagatctggagccaaggatgtgtcttcttactttggccccatgctgctccattcacaggccatcctccctctcacctccagagactgagacggagaaggactttggaggacattctgcacctggaactcctggtagctgtgggccccgatgtttcccgggctcatcaggaggacacagaacgctacgtgctcactaatctcaataaaaaaaaa

SEQ ID NO: 2487 - DNA, 213 bp, Homo sapiens
  misc_feature (1)...(213): n = A,T,C or G
acctgaggcactttcctgtntaganacgtattnaacaggcaacnntcanggaangcactgnttcccnggggcccacaccactagggaagtcaacncncaattcgctggaagcagtagtcctggcactactaattnttttttanggttgnaganataggacattantttttnacagngngatntgcttttngccaatacatgatgcttttactt

SEQ ID NO: 2488 - DNA, 213 bp, Homo sapiens
  misc_feature (1)...(213): n = A,T,C or G
gatcaatcagtcgcagccagttcagcanttcactacactnggngnccaggacnacttacctaccacttttggnacacagcactgnccaacatgcatgtaatgggacaaggccctncatttatatattcccccagggctgcaccttgtaactncaagnataccttatttggcanctttcttaagnnctcaaattaaaaatgtgaaccactaaga

SEQ ID NO: 2489 - DNA, 212 bp, Homo sapiens
  misc_feature (1)...(212): n = A,T,C or G
acctgaggctgtactttangatgccgccagtaatagtagcattggnattngcntatacantatggnatgnagagaccacacatgctggaatgctgacaatggtaagctnactnaccactttgaagagncagagaagctagttgttnttaaccactgntncanntctccagnctggaanntttttttantattttgatggaatatgagacctc

SEQ ID NO: 2490 - DNA, 212 bp, Homo sapiens
  misc_feature (1)...(212): n = A,T,C or G
gcgcctcagcgtgacctncacntcaaaactgggggtnaaccagaactggtacccngttgancnaggnttgtatgnnttnttgccctccntacccggctctantaaaaaactgactttctttgncactccaaaactacctntctcncancttcantgaancttttcaatcctgaggatgctnaactgcttgcaaccngatgcccccccccccc

SEQ ID NO: 2491 - DNA, 301 bp, Homo sapiens
  misc_feature (1)...(301): n = A,T,C or G
ccgaggcggaggccgagggaggactccgggccgtnccacagtaaccttcccctgtcctcctctcgcttaagagaaaccnggcagtgcggctgctttacagantgctcagactgcaagaaaactttctctagnntatgnngnggaatnttaaatctgtnttaagagtnaaataactaggtgaaaaaaaccctttaaacacctnngaccaaagaanncatcaaatgannannatnacgnggggggggnnncccctnncantgaagccgattgctttnnacagcgatcaagaagatcccttgaa

SEQ ID NO: 2492 - DNA, 211 bp, Homo sapiens
  misc_feature (1)...(211): n = A,T,C or G
agtttcctgttacttcctgtttggcccactgnacngtnaatggccancgcactgntctgacctcnccacataaacagtcctgcngaagtggacttgacagtattataaaggnactgacccancngttctncagcgcccttttgctgnaattgtgattnnactgagcattaaaaaggctcttggagaaattcttccatttgaggccaaaaaa

SEQ ID NO: 2493 - DNA, 210 bp, Homo sapiens
  misc_feature (1)...(210): n = A,T,C or G
cagcccaaccttagctaccnngggcaacccgaatttgtgngaagaccgggngaccggtttncatacaactccactgggaaggaatgcatgtaancancctgttaacttnngaaaacaccantgtaagtactgnacaacgttgnaagcaggnanaaatatggnagtgtatgttnacagctgcaatnggatnaatacctaaatgtttgagat

SEQ ID NO: 2494 - DNA, 209 bp, Homo sapiens
  misc_feature (1)...(209): n = A,T,C or G
tttttatgagaagaaaaccatctttttnggcccatgaagaaaacnctttgcaaacngcgcagnactgngtntttcnaggngcngaangcggggcatntcctggtncctaccacaccagnacacacggngacctgggtaggggcaaaataaagggaacangagagccaggggaagtcntgaagtagggcagaccctggcactcaccatgg

SEQ ID NO: 2495 - DNA, 208 bp, Homo sapiens
  misc_feature (1)...(208): n = A,T,C or G
cgtttggagaccttggatcccagcactacagaccaaaccacaccagagttagagacttgccagttcctgatacagctgtccttaactgttggattctagtgtgtctgtgaccattgaggctctgccagtcttgaacttctcgtgtccttctacctgttctttgtgtgtcttncttgagatactgtntaaggatgtgataattaaatat

SEQ ID NO: 2496 - DNA, 207 bp, Homo sapiens
  misc_feature (1)...(207): n = A,T,C or G
acgcctacacaaggcgaagtcgatggggcanactccaggactagcagctagtctntaccatcntncanatnatagcntgcttaccttcanagatcatggtgtgctnggcgtaanacgcataaatgtatnagacgcatctnngcataaggaggaagagggngggaaannaggcccttcnacttgtctttactatacttcgcttgctag

SEQ ID NO: 2497 - DNA, 206 bp, Homo sapiens
  misc_feature (1)...(206): n = A,T,C or G
cagcccatccttacctancnagggctaacccgaatttcatgtgaagaccgggnncccggttttacatacaactgccactgggaaanaatgcatncatagcacctttaaatatnngaaaacaccactgtaagactggaacaangntgaaagcagggggaaatatggcagtgtatgttcacagctgaatnaattaatacctaaatgtt

SEQ ID NO: 2498 - DNA, 205 bp, Homo sapiens
  misc_feature (1)...(205): n = A,T,C or G
ctgaggttatgggcggtggtggcgagagctgtagtctcatcgctgaggtctgagcactgccctgcagctgttcgatgactttaagaagatgcgtgaacagattggccagacccaccgagtctgtctcctcatctgnaactaaccccctanctagcantttntntttgngccncaaataaagttattgtgctgctaaaaaaaaaaa

SEQ ID NO: 2499 - DNA, 204 bp, Homo sapiens
  misc_feature (1)...(204): n = A,T,C or G
ggacttgggcctgccgtgnctnccttgaacncnggtttcaggggatagaactncnngtgttcaggcttggaaggcangcactnctacccaggggaccacctgnctggccccaggaaccagnaatttcnnggtcncttttgnctgnncagaaagttcaaggncngcctggagtgcatgtgacccccatcttgaaaaacaaaacaa

SEQ ID NO: 2500 - DNA, 203 bp, Homo sapiens
  misc_feature (1)...(203): n = A,T,C or G
tcttaactttctaacanggaaacttccncaggacgctgcgttgttgttgttcccactgcctggcaaaactctttatctngtagcacttccgaagtactcctacttatcatatccttcgtgactttaagagtaacttcctgtgtcaatccttcaggacattcctcaaaataaatgttttgttcattgttggccaaaaaaaaaaa

SEQ ID NO: 2501 - DNA, 202 bp, Homo sapiens
  misc_feature (1)...(202): n = A,T,C or G
aaggtagaggctccttgtanctcttagaccccaggctagcgngtgtcgaaantanggtcactagnannaaggctcangggttntggagtctttcnnatggccngngcacnaggcataccttcacgcnctatnctgaggaataaactcccataagccagtcanagcggnccnnttgtaaaggggactgggctcacactcttgc

SEQ ID NO: 2502 - DNA, 202 bp, Homo sapiens
  misc_feature (1)...(202): n = A,T,C or G
atatacacttgttgtccaccgcacacagtgttggccacacnggcacggagtatagcgancantccaaaangcggnatcatctgagcacanccgaganttcatancaagtaacnctccangangcgngcctgccgactgtgtnacacnnnttnataangggtgcttatgacccctnntaaaatgtccaaacattaactgggac

SEQ ID NO: 2503 - DNA, 202 bp, Homo sapiens
ctcctggtaactccatcgggcctacgctctggggcaaaatgtctgtacaggatcacaaatatgagtggagtctggtatggtggctcatacccggaagcccagcacttcaggaagatgaagcaggagaacttggggttcaaactgtctggaattcaggagagagttttaggccaacctgggttacatcacatcaaaaaaaaaa

SEQ ID NO: 2504 - DNA, 201 bp, Homo sapiens
  misc_feature (1)...(201): n = A,T,C or G
agatgttccactgctgagctgcccaagcgagccctttgagtctgttttctctagaaagaagaagtcntactatataaagatctacagtcatgangacaccccggtactggtttaacagacagcaaagaattgacatcaacctagctgtccacaacagatgaatggataatggaaattttgttctgtgatctaaaaaaaaaa

SEQ ID NO: 2505 - DNA, 201 bp, Homo sapiens
  misc_feature (1)...(201): n = A,T,C or G
atgccggtcacagcccananggccaatgaggaggctcaataaggtaagagtgctgcttccaagcatcacaactgggagttnaatccctgggacctacatgatgcaaaaggacaccgactcccacattgttctctgactcctacctgggtaccatgtcttacgcaacacccccccccaacatattgcacaaaataaaaatgt

SEQ ID NO: 2506 - DNA, 200 bp, Homo sapiens
  misc_feature (1)...(200): n = A,T,C or G
cccatccttacctacccagggnnacccggatttntgttaagaccgggggaccggctatgcaacaactccactgngaaacaatgcatgnaancancttgtaancattaggaaaacaccactgtaatactggancaaagttggaagcaggggtanatatggcagtgnatgttcacagctgaattnattaatacctaaatgtt

SEQ ID NO: 2507 - DNA, 200 bp, Homo sapiens
  misc_feature (1)...(200): n = A,T,C or G
tggcaaccttaaatatactcattaggttccagctgagctncnancacccatcttacccagacaatagtaaagccatgatgacaagaatatttggaatagggctagcctatgtaatgctatatccacagaatatgtgttcctgtccaagtaaaaggntggaaataaactacgagccttgtattggtcaatggggatagctg

SEQ ID NO: 2508 - DNA, 199 bp, Homo sapiens
  misc_feature (1)...(199): n = A,T,C or G
ggggatcggaaaactgagcagcagatggagcttctatgagtgcccatggcngcctgacacagnagtngagcgctcagtcantttctgcggattcagctgaatgatattcccacacagagatacagcttggcttcgnggtcaatatttaatgcctgcatttgttagttttaaacttcacacctatcacaacttacaggtt

SEQ ID NO: 2509 - DNA, 199 bp, Homo sapiens
  misc_feature (1)...(199): n = A,T,C or G
atttgatgtgaagacncgncgggcccggttctnacaanaactnccactggnaagacaatgtcatgtaaggcacctgtaacacattaggaagaacacacactgtaaaactgtancaacagntggaagacaggncgaaaatatggacagatgtgatgttncacagcctgnaataaattaatacctgaaatgttagggtaac

SEQ ID NO: 2510 - DNA, 199 bp, Homo sapiens
  misc_feature (1)...(199): n = A,T,C or G
atataagccattgtttgagcagcccagccttcctacctngggcnacccgaaattntgtgaagaccggnntccgntntncatacaactccactgggaagnaatgcatnaancaccttgtnaccttanaaaacaccactgaagactgnacaaagttgaagcnggngaaatatggnagtgtatgttcacagctgaattgatt

SEQ ID NO: 2511 - DNA, 199 bp, Homo sapiens
  misc_feature (1)...(199): n = A,T,C or G
gagcaaaccctgtctcggcantacacaacnaaccancagacnaaacaaaacaacancnatnaaactaancttanattgntgaantatggnagctncccgctaacagccccgccgaccactatggcctcaaactcagatccttagctgcctttgcttctagtgctggaaataaagccattggccacctcaaaaaaaaaaa

SEQ ID NO: 2512 - DNA, 198 bp, Homo sapiens
  misc_feature (1)...(198): n = A,T,C or G
gggtggagggtgccgatgttgcggctcctggctttccgcacnaggnccatgaggatctccattatacggnctgtgacaganataaacacattgaacagggtaccacactggcgaacagaanccaggnagacgcanaacttgtgaactgnggccaattaagaaccataaagcacaccctgtgttgtgctcagagctggg

SEQ ID NO: 2513 - DNA, 198 bp, Homo sapiens
  misc_feature (1)...(198): n = A,T,C or G
acctgaggtggtgctgaggcccnggggcttgctggtgcctccncactganaacacacnggactgagncccnctccaannccctnccgtacatctgtgtgactcctggtncagccacctncaacgagggtggtctagaagatgccagctgacggttcagccaataaagcattccatgagcatgtggaaacacaaaaaaa

SEQ ID NO: 2514 - DNA, 197 bp, Homo sapiens
  misc_feature (1)...(197): n = A,T,C or G
gtatcggggtgccgcggcanncanatgagctcttgctccgtgcgacttgcgtagagcgnaaggtccttaggcctcttatgantcccttatngcaatncacnntntntcnttntactcnttgcntaaccnaagcgtnacccaattgattctatgcaaaanggcanggctctcggcgaacgcgccttaaaaaaataaaa

SEQ ID NO: 2515 - DNA, 197 bp, Homo sapiens
  misc_feature (1)...(197): n = A,T,C or G
tgagagcactgagcttcggntgcgcaagttggtccagctcatcgctctgctgccgaagactnggagatttccttttctaactcctcacagcggattcgataatcgtctttggctgcttctagnctgcagncanacaaactagataaaangcactattangtgtctcataattttccttagggagaaaagaaaacaaa

SEQ ID NO: 2516 - DNA, 197 bp, Homo sapiens
  misc_feature (1)...(197): n = A,T,C or G
gagcacatttccttanggagcnagggagtnccctattgatattacaaggttaggggaatantttcataatgggncctacttatgtganagaataancncagggccntggttcaatggananctgggggggntaatgngcnggtntggangcctttacaannaatgttccttactaagngccttccttgaaaacaaca

SEQ ID NO: 2517 - DNA, 197 bp, Homo sapiens
  misc_feature (1)...(197): n = A,T,C or G
ctcacccagggcaacccggatattcatgttaggnccgggntncncggntntgcaacaactaccactgngaaanaatgtcatgnaagcagctgtaacnattagtaaaacaccactgnaanactggaacaangttggaagcnggggaaatatggcagtgtatgttcacagctgnaataaattaataccttaaatgttta

SEQ ID NO: 2518 - DNA, 197 bp, Homo sapiens
  misc_feature (1)...(197): n = A,T,C or G
tcagctcttgcggaagagcgacagcaaccccntcgagctggnagactcagtggcacatgggacccgcaacgncangcgtccantngcagtgtggtagatcccgctgancacagaaccccgncactcaaatnttgtannctttaatgntnaactntctgaggacaggtgnnattagccngaacacagattatgtttac

SEQ ID NO: 2519 - DNA, 196 bp, Homo sapiens
  misc_feature (1)...(196): n = A,T,C or G
gtcacagaaaccaagtgggtttgaaggnaccggcagcagcctctacangctggtcattagccagctgctctacgacggntacattagtatcgccaatggcctcatnaatgagnataagccccagtnggtgtgcgccccctgggtagcagntcttgcatctcatcaagctagggatggnnaacgatgacactgcgga

SEQ ID NO: 2520 - DNA, 195 bp, Homo sapiens
  misc_feature (1)...(195): n = A,T,C or G
gtgtacttcgtaccctanttcnattgacacacagggtntttgtggatgtcgagacctgncattcggntgcacgttgtggtacantgctattctgacaatatctacggangcaggggggtgggancccnacagcantttgngnttnctgcgaacactgctgntgantcagatagangatacttaggcatgaagacc

SEQ ID NO: 2521 - DNA, 194 bp, Homo sapiens
  misc_feature (1)...(194): n = A,T,C or G
cttctctgctggcctcaggccttacaggcaggcancccngannataaatgtacaaatgtccacggttgctggttaacagattccngctattagcatcagcnncaaggttcangatataccagaggggttttgttttcgaaccagatcaaaataatggtgataactttaaaataattaaactttaaaactaccca

SEQ ID NO: 2522 - DNA, 194 bp, Homo sapiens
  misc_feature (1)...(194): n = A,T,C or G
agctactccagggttacncggttncatgttangaccgngggccggcntacaacaacttccactgnaagacaatgcatgnaagacactctgaaacatagcaaaacaccactgatgaactgaacaaagttggaancagggggaaatatggcagtgtatgttcacagctgaataaattaatacctaaaaaacaaaaa

SEQ ID NO: 2523 - DNA, 194 bp, Homo sapiens
  misc_feature (1)...(194): n = A,T,C or G
cctgctgtgcggacaggganntacgtattaacctntttcantttcttggnccttgggaaaactactggggtanggtaagaccagctgtaactctnaccagtacactggatggncaagttcaacttccaaattgcattcaccacaggtggncattgcatttnagggnaaaagagtagngggtgagacaacagccc

SEQ ID NO: 2524 - DNA, 193 bp, Homo sapiens
  misc_feature (1)...(193): n = A,T,C or G
tctgcaatggaaagancctgcggcctcctcctcccatttatacttataggncccattaacctgaccagtaccctggttcccatgaagacctaatacaatccacctcaatacatccatgacagctgtacaaacagcaaccagccatttcagggaagaataaattttggctgcagtccaaacatcaaaaaaaaaa

SEQ ID NO: 2525 - DNA, 193 bp, Homo sapiens
  misc_feature (1)...(193): n = A,T,C or G
aaagctcaggctacgctnctgcctacaccacgtcctcacgctgacgtgaccacacttgtttcctgccatgataacaatggaactaaaaacctctggaactgtcaatacctagttaaatgctttcttttataaganaanaagagagacatggngnctctttcacanaaataanactctaactaacacacccaaa

SEQ ID NO: 2526 - DNA, 192 bp, Homo sapiens
  misc_feature (1)...(192): n = A,T,C or G
acctgaggatgggctggggaagtatgtgctaccacgcaccccacaggctngtgtttgaagtcacacccactgcttatattcntcngaccccatctcattactagaggtncctgggaggacngaggaagctacaacctggcactcagccctagtttcaggccccagtgccnccaaacaaataaatgattcttg

SEQ ID NO: 2527 - DNA, 191 bp, Homo sapiens
tgaggctggggctgcgtatctgaagatgcattggaattgctgatacttctggcccttaactgtctagtgataacatccaggggtgagtacagctgcccttagctctcttttgtgcttttgtgacttggaatgcctaaattttattttggttctcctttctctgagaataaaactaagtagaataaaaaaaa

SEQ ID NO: 2528 - DNA, 191 bp, Homo sapiens
  misc_feature (1)...(191): n = A,T,C or G
atgtcaggtcttgttttnaagcccanccttaactacccagggtacccgntttctgtgagaccgggngccggnntacaacaactccactgggaaanaatgcatgaancacctgtaaanataggaaaacaccactgnaagactgnaacaacgntgaagcagggggaaatatggnagtgtatgttcacagctga

SEQ ID NO: 2529 - DNA, 190 bp, Homo sapiens
  misc_feature (1)...(190): n = A,T,C or G
gggctacccggatttcatgttaggaccgggnntccggtttgcangaactnccactgggaaanaatgtcatgnagagcagnngttancattaggaaaacaccactgtaagnactggaacaaagntgnaagcagggannnatatggcagtgtatgttnacagctgaatangattaatacctaaatgttaaga

SEQ ID NO: 2530 - DNA, 190 bp, Homo sapiens
  misc_feature (1)...(190): n = A,T,C or G
attcgtgtgagtctcgggggtccgncttacatcanctccactgggaagagaatgcatgtaancaccctttcnttnttaaaacaccactgaaagactggaacaaagntggaagcngggngaaatatggcagtgtgtgttcacaggctgaataaattaatacctaaatgnntgtattcatctatcaaaaaaa

SEQ ID NO: 2531 - DNA, 190 bp, Homo sapiens
  misc_feature (1)...(190): n = A,T,C or G
acacacatgtgataaaaactgtctgtatacataangaatacactaccagcncctagtcccaaaaaaacattangaagnctacgggcnggggnggcaggtacnacgntctggtggantanttntttcataggnagcnngggagagcancttgngngaggaggaagacggtggaggcggcctataatactag

SEQ ID NO: 2532 - DNA, 190 bp, Homo sapiens
  misc_feature (1)...(190): n = A,T,C or G
ctcggccgattttgtgtgntaacatgcnctcgnggtggnggagcctnccgctctcaactagcagtatcctggaacagctgcgtgagcgncaagcnagcncccantgtgtcngtgaagccancactgacccnnagaacccctgtcacatggacggccaacactgnctgnngccactgctatactgcgtgaa

SEQ ID NO: 2533 - DNA, 188 bp, Homo sapiens
  misc_feature (1)...(188): n = A,T,C or G
cctgaggacccagatncttgagcctngccttcaagacccnctagagtacagaagcaggatnccntcaaaggtctcccggcagccatgngtgatancacagcatctaatcccagcctgggaagggggacaaggtnggntgntnncangagttnnaggccagcgctgggctnataggcaccttgactcag

SEQ ID NO: 2534 - DNA, 188 bp, Homo sapiens
  misc_feature (1)...(188): n = A,T,C or G
aagccccaactaaaccacntnacccngagacagctanncnnccatgagctgggacttacagttgccacttcanngggttncncnagcctaaagaaagaccagggaccctgggttatgactgcctgtaaaacagccttcacaactaaagatcaacaactaaaaaactgacagttaacttcaaaaaaaaa

SEQ ID NO: 2535 - DNA, 188 bp, Homo sapiens
  misc_feature (1)...(188): n = A,T,C or G
atattcatgtgaagaccgggnctccggcactnacatacaactaccactgngaananaatgtcatgtaancactctgtaaccatgaggaaaacactcactgtaagaactgcnacaaagntggaagcaggggnaaatatggcagtgtatgttcacagctgnaatanattaatacctaaatgttaagatac

SEQ ID NO: 2536 - DNA, 191 bp, Homo sapiens
  misc_feature (1)...(191): n = A,T,C or G
attatgtggtggggccccagacctgggttgcctggtnaantcagnccgggaccgggctggancagggtnggggcggantcctnccggccgatccgccccagctcggccactcactanagccgcccccgcttgtgtgtttccagaaatgaattgtcttctccggaaagggagctcctttgcaaaaaaaaaaa

SEQ ID NO: 2537 - DNA, 187 bp, Homo sapiens
  misc_feature (1)...(187): n = A,T,C or G
gatatccgaatgatgcctnnagaactctgtaaggnagcactctaggantctgcacttttacaagctnctgaaananntggntngcacacgactcatggtcaaagactagagtctncctaggggacatgcaggctccatgctaacacatacacactaaaaatannntttacgtgctaaaaacaaaaaa

SEQ ID NO: 2538 - DNA, 187 bp, Homo sapiens
  misc_feature (1)...(187): n = A,T,C or G
gctgaggtagcagtcctgggccagaggccataantacttnttgaggaactctanaaggagcgcacangaagcactggntggctncatatatntactgctctcgaatccatgaattacagctcggacacccggagcatccgaangtcctatncggaanctgctattctctanaaagtataggaacttc

SEQ ID NO: 2539 - DNA, 187 bp, Homo sapiens
  misc_feature (1)...(187): n = A,T,C or G
gcccatccttagctaccnagggctacccgnatattcntgtaggaccggnnnccggttttncatacaactccactgggaagnaatgcatgtaagacaccntgtaacctattannaaaacaccactgtaagaactggaacaacagttgaaagcagggggaaatatggccagtgtatgttcacagctgca

SEQ ID NO: 2540 - DNA, 186 bp, Homo sapiens
  misc_feature (1)...(186): n = A,T,C or G
agaggctgactaatgagggaccactttatccagactcctttcctnccactgccagaggctgcacatctgaccanagactnggcngtgnaggtagggagggggtgtccantcctacnttggctagtcttataaacngcacatngcnaaaggaaggtgacttntacanctataactcttcctcacaga

SEQ ID NO: 2541 - DNA, 185 bp, Homo sapiens
  misc_feature (1)...(185): n = A,T,C or G
gacaaagctggacattttatctcaaggtctcancagcaacatacactnctaccnnantggnaagcagtgcttcttcangggngtcntataggacagcnggaggtctgtggnagagaggacatacggacnacagcctcggaaagaagaaatacangtggtgtgtttcctccatgagagggggcaac

SEQ ID NO: 2542 - DNA, 183 bp, Homo sapiens
  misc_feature (1)...(183): n = A,T,C or G
gacgtcactgccgaaaggtgccccccnccntggcttgcngngaggcctnagagcnttngtaacgatcantcagcatcccacaaantggatgaagagaaccggcttcctctgtcgcccatgtgtgtgctagtgcatttttgcgatcatatacaaaataaacaaacatgcgcaaagcaaaaaaaa

SEQ ID NO: 2543 - DNA, 183 bp, Homo sapiens
  misc_feature (1)...(183): n = A,T,C or G
aagcagcttgagcacgtatgggangcgaaangngtgagaatgcgaaaggagaaggaaggcactctctggggaggaagaaaggncaagaggctacangctgccttctatctggcagagtccganggtggtacaggacatcacagctctagagatagccatactattctcccaaggctcaccttt

SEQ ID NO: 2544 - DNA, 182 bp, Homo sapiens
  misc_feature (1)...(182): n = A,T,C or G
cgcaaggctacagcacagtcttttgcttnntactcagcccactgcattacatggtaaagnangggacaangngcntggccgttgtggngtgaanacggacagtgttacnaancgganattgatntagatagatgaagaaaanggcaccgttgcaancacctttgctgtttatggcaatgcct

SEQ ID NO: 2545 - DNA, 182 bp, Homo sapiens
  misc_feature (1)...(182): n = A,T,C or G
ggttggctgttgtggcacatattctttgnnacctancactcaggnnggaaggagcaggcagtatttctgagttcaaggccagcctgatctacagcaatgagttccgggatgaccagcaactgcacaggagaaatcctgttttgaaaaaccaaataaaaccaaatcaatcaaacaaacaaaaa

SEQ ID NO: 2546 - DNA, 182 bp, Homo sapiens
  misc_feature (1)...(182): n = A,T,C or G
ggcctggatgatgtacaaggctcanaagccccctgccaggttctttgctcctatgtgagtggaccaagccccaggctttcctatttagatgtgggtgtgtttgaggctgtcctcctgatgatcacaaccctcactgagggtcacctgttgtccatgaactcccattgttctctgtgcaaaaa

SEQ ID NO: 2547 - DNA, 182 bp, Homo sapiens
  misc_feature (1)...(182): n = A,T,C or G
aggaggaagccccgggncagacaggtggcaccagaccctggaaaactgggaaagnacaaccactgnaagaaaaggaatttctgtccactattagtttttactaagtcattagtttttacttccatgcataggctgtcctgttaaatgtctataaaacaacaatgtgcttagcatggcggatt

SEQ ID NO: 2548 - DNA, 182 bp, Homo sapiens
  misc_feature (1)...(182): n = A,T,C or G
ttcttgtttttatcgcccatccttcctacccaagggcaacccgntttcgtgtaagaccggnntccggnctacatacnactccactgnannnaatgcatntaaggcacncttgtaatatangaataacaccactgcaagactgaacaaagttgaagcagcgggaaatatggcagtgtatgttc

SEQ ID NO: 2549 - DNA, 180 bp, Homo sapiens
  misc_feature (1)...(180): n = A,T,C or G
tcacttcagcttctgtccnaaaaaccataagagtnncnggccgggggggggtccacacnatgggggactacttctttcnnagganncatgncgagcacccttggnggaggangaagaggtggaggcngctntaatactagncaaacatgcgtntgggctacangggataacattcatgca

SEQ ID NO: 2550 - DNA, 180 bp, Homo sapiens
  misc_feature (1)...(180): n = A,T,C or G
tgacaatattatgagtgnctgtgaaatatnctaatacgnccagggaataaagaccatatnatgataatattangagctaccagggnggggtcanngtttctacactactataaagcctnnatgcnnccttaaggataacatagcggtntgtactntntnagaggaatgatattgccatgg

SEQ ID NO: 2551 - DNA, 179 bp, Homo sapiens
  misc_feature (1)...(179): n = A,T,C or G
atattcatgtgaagactcgngnnnccgntttanatacaactaccactgngaananaatgtcatgnaancacctgtaanctattangaaaacaccactgaaagaactggaacaacagttggaagcaggggnaaatatggnagtgtatgttcacagctgaatanattaatacctaaatgtt

SEQ ID NO: 2552 - DNA, 178 bp, Homo sapiens
  misc_feature (1)...(178): n = A,T,C or G
gggtacccggtttctgtgaagaccgggnnccggtttgnaacaactaccactgggaannaatgcatgnaancagctgttaccatagaaaacaccactgnaaggactggaacaaagttgaagcaggggtanatatggnagtgtatgttcacagctgaatanatnaatacctaaatgtttg

SEQ ID NO: 2553 - DNA, 178 bp, Homo sapiens
  misc_feature (1)...(178): n = A,T,C or G
catggggtcgctcctgtntgggtatntacatgttctccangaactggnccgcacagaggtcacttacgtngggaagtctgnancaactgaaanaanatngcttncaggctcctttgtcngtatgagtgtgaagaataagtagtaatccgagttaataaacatacaaatggtaaggaga

SEQ ID NO: 2554 - DNA, 178 bp, Homo sapiens
  misc_feature (1)...(178): n = A,T,C or G
gggcctgactcgccttacctgcgacgcttaanggtatcgcgcgggtnccggatttccagngcanctncntttataagncttcttgacgagttcttaatgaggggatnaanttctntagagctnggnaggaactgggagcggccgcannaaaatatntttattttcatcaaaaaaaaaa

SEQ ID NO: 2555 - DNA, 177 bp, Homo sapiens
  misc_feature (1)...(177): n = A,T,C or G
tacagttcctgcaacagcttaacatgnttgggntatancatggaaactgcaacatccagnttgcaactctccntgctcactggacgngggataacttnttcaccgcancnaccttaaanaagggtctacagaaaattancattagtgtaacattcanantactgactgattaactaa

SEQ ID NO: 2556 - DNA, 176 bp, Homo sapiens
  misc_feature (1)...(176): n = A,T,C or G
gactgggggaaggcctgatctgcagagaggangcaacagcngaaaggaggtgacatgaaaatgacacttcaataggaaactaagttaaggaaaggcttcatgactttcatatctgggataagtacctttaaaaaaacctatacaatacatagcaggaaaccatttaaaaaaaaaaa

SEQ ID NO: 2557 - DNA, 176 bp, Homo sapiens
tctgtgaagcctccttgtgctgcattaaacaaaataagaaactattcagtaagacaatgtgacttgtgtccaatatggagggacaatccggttctctaagatttctgagaacttatattgacggaggttgcctttcagcctggattcaaagctgtctgggatgccatagggcaggt

SEQ ID NO: 2558 - DNA, 176 bp, Homo sapiens
  misc_feature (1)...(176): n = A,T,C or G
aggaacgcaccagagctcggcataactctaggatagantgtggnaagtagcaaggcagcatgatgtcctagtaaagangangcagaagcctgagacttcttgcctacagagaccccctacgaagactagttaaatcttccccctgtcctgtacataataaatacgctaacattccg

SEQ ID NO: 2559 - DNA, 175 bp, Homo sapiens
  misc_feature (1)...(175): n = A,T,C or G
cacccactctggaatacgngaagaagcggcctggatctgagcagagccaaggcggcgctagctgagaattacctacattttgcctcgcttcctcccantttggaatcccaggttgcttgcagactaaagagaccncaggcgattatttggattaaaanaacaaacgtttgatgaa

SEQ ID NO: 2560 - DNA, 175 bp, Homo sapiens
  misc_feature (1)...(175): n = A,T,C or G
tcgtcgtcaggcctcggggnacacggttatgacatacaacctancactgncnanagaatgtcatgnagaacnggcntctaatcatcaganaaacncncacgtagtaagtactggancgaacgttcggaagcngcnggtntnatatgggcaatcgggatgtttcacagctgtaatt

SEQ ID NO: 2561 - DNA, 175 bp, Homo sapiens
  misc_feature (1)...(175): n = A,T,C or G
acctggcagctctctgcgatcgcttgtctgcagnncaccaggccccagaagatctcctaanatacnntgaagctggtatgcngctcctccttnaccaggnctggctggnctgcaggctnctggngganttgngaatgccatactcntgaaccttgccctaaaagtcctgggatct

SEQ ID NO: 2562 - DNA, 174 bp, Homo sapiens
  misc_feature (1)...(174): n = A,T,C or G
gccatggcaaaagtatccaagttctacacagngaatntcgacntaantccnannantgacancntctacatanaactgacactgggaanttanaatncacgttctgcttttccaagctaccncaggcacaggggtctnaacagaaggcaggtcccacttctcttggggatatgg

SEQ ID NO: 2563 - DNA, 174 bp, Homo sapiens
  misc_feature (1)...(174): n = A,T,C or G
agtgctattagtggctggtgatttaccgtggtgcagtgggcaanctgnccgtgntccagaannttcncttcctggncngacagganaacggtnagtgaccttctgatgggaagaatacatgttcccaggaacaggcaggacaaggtacttacatgggaagctcaaaaaaaaaaa

SEQ ID NO: 2564 - DNA, 173 bp, Homo sapiens
  misc_feature (1)...(173): n = A,T,C or G
acctggaggatggtagntcttttaagcagcaattgncanatcntgttcaatannatgaccctgcatccnnggtacngggncacgtttccccggtatgaagcacngcatgacttcccacaggcngnttgnaatatcatttngagtngcttantttcttaatggcattttcctgg

SEQ ID NO: 2565 - DNA, 173 bp, Homo sapiens
  misc_feature (1)...(173): n = A,T,C or G
ggagcccagcctcaactaccnaggccnaccngaaattgtgngaagctgggngccggtttncancanctccactggaagnaatgcatganancaccngttccttataaaacaccactnaagactgaacaacgttgaancaggggaaatacggnagtgnatgttcacagctgaat

SEQ ID NO: 2566 - DNA, 173 bp, Homo sapiens
  misc_feature (1)...(173): n = A,T,C or G
gatagaggacgagcctctcactgtngccgacccctgncgtaacaggaanggaaancctgttctcccgtggacatccatcngacaggaacaancaccataacatggngttanatgctgnggnccttccggagcgctttactttgaagcgacnagcacgtttcctgctgctctta

SEQ ID NO: 2567 - DNA, 172 bp, Homo sapiens
  misc_feature (1)...(172): n = A,T,C or G
ccctcttctggtacttcngcccctcatgtgcagaaaactggctgtatacatntggnaatacantnccatgcttctgtnccaaaaaccatagnagnngcaggccgtggcccnngtngacnctatgggtggactacntntttcaggaggangnatggggagcagcttggtcgga

SEQ ID NO: 2568 - DNA, 171 bp, Homo sapiens
  misc_feature (1)...(171): n = A,T,C or G
aggttccctgcactacaagctctgcngacccctgggtnttcccttaggtganggattgcacatgaaggaagtgaaggnncccngatgcccttctgctnnccaacagncnaantgacaggagcncncancggctcttgaccanncgaaggcacacactccttccagaacccc

SEQ ID NO: 2569 - DNA, 170 bp, Homo sapiens
  misc_feature (1)...(170): n = A,T,C or G
tgaggtataacgcacgggtcgcctcagtgaaggcactgcaaacaaaatgatngctngttntganntnncngagccttaattcngaagatcnaaggctcctgcnacatgtgnccatgcaggtgactgnncctttgntcntgaggtgcctggatggaggctcaaatagaaga

SEQ ID NO: 2570 - DNA, 170 bp, Homo sapiens
  misc_feature (1)...(170): n = A,T,C or G
atggccaggaggccgtagataggacacatgcaaacacagcagctaagggtcagagcaatggtctttgcccttaaagatctaccaagctaggccagcttgtcaatacatggntaatattgacttgttnggcatagattatcagtacattatgttctccatcaagtcagttt

SEQ ID NO: 2571 - DNA, 169 bp, Homo sapiens
  misc_feature (1)...(169): n = A,T,C or G
aagcgctagagaagataantgnccccaancgcccnacttttacagttctnggactaactagnnaccactnaggaaacnaaccanatccnccacctgtgctanggtttgatgactcggcatgcgtgtatgcnagagaacgccgagaggaacgagaaaaacagataggtgg

SEQ ID NO: 2572 - DNA, 169 bp, Homo sapiens
  misc_feature (1)...(169): n = A,T,C or G
ccggggcaccggtttncaacaactccactggnaagnaatgtcatgcaancanctgtaatcatagaaaaacaccactgaaagtactggaacaacagttggaagcaggggtanatatggcantgnatgtttcacagctgantnaattaatacctaaatgttaaaatgtcga

SEQ ID NO: 2573 - DNA, 168 bp, Homo sapiens
  misc_feature (1)...(168): n = A,T,C or G
tgatgtggcatgagggcncttaccttctcttccacctnggcaacnnacaagaggtaggtnttcacagctgngctgtgactatataatgaataactggaaacatacaacgcntggaaaggctcggcaggctgancagtgctcctgccggttgggtagaagagatcctgg

SEQ ID NO: 2574 - DNA, 168 bp, Homo sapiens
  misc_feature (1)...(168): n = A,T,C or G
cctacctacctagggnacccggtttcntgtaaagaccgggntccgncattacaacaactccactgnnaanaatgcatgaagcnncntgtgcttanaanacnccactgaagactgnacaaagttgaagccnggganatatggcagtgctatgttccacagcttgaatta

SEQ ID NO: 2575 - DNA, 168 bp, Homo sapiens
  misc_feature (1)...(168): n = A,T,C or G
gtgggtggtttttaccggctgnagttggggaacctggccgtggtccagcaaactccgcttcctggtanaactganaaacggncagtggacctactgtntgggaaggatncatgttgcccagaacaggcaggcactagggttacttacanggggaagctcataaaaaaa

SEQ ID NO: 2576 - DNA, 167 bp, Homo sapiens
  misc_feature (1)...(167): n = A,T,C or G
tgagtgtcctcccagaagagtccgagtattcgagtncttcctacataatttacggttatcagaaattccagtctcacttcccagcagcacaagttatcatggtaaggtagattccagaggatttcactgtancaaaagaaacagtancatgatctgaaaaaaaaaaa

SEQ ID NO: 2577 - DNA, 167 bp, Homo sapiens
  misc_feature (1)...(167): n = A,T,C or G
gctctcactgccatgtatccacancantggancacacagctgtangtaatattttgggcattatgnacatgactatcttacatgaancgggaatnnaaatctctaactgccttcacacaaacccctttcttcataactngcggcgcaaccattccaatttgcgcctt

SEQ ID NO: 2578 - DNA, 167 bp, Homo sapiens
  misc_feature (1)...(167): n = A,T,C or G
tttagtttctgtctatgacacgttgctgcccatgttcacgtgcatgcctggtgctgtcaggatcacnaccaaggtgttgggatctggcgttaaagcagggttgcaagctccagggaatggagcctggatcttcaggagaaacagaaagagctcttaaagaaaaaaaa

SEQ ID NO: 2579 - DNA, 167 bp, Homo sapiens
  misc_feature (1)...(167): n = A,T,C or G
tctggtgtttcaccggggtgcactgggcaacctgnaccgtgttgccagcaaactncgcttcctggnaggacagnataacggncagtgacctctgnatgggtanatacatgttcncagnaacaggtcaggtacaaggtcacttacatggggaagctcaaaaaaaaaaa

SEQ ID NO: 2580 - DNA, 166 bp, Homo sapiens
  misc_feature (1)...(166): n = A,T,C or G
agggtgcatacacccttttanggctactacttgggtggacaagaaggggcagtatctcgctgngttttgaggccagcctggnctacggctcaagttcgtagggacagtctgcactacataggaaagcaccctgtcaagcaacactnataagacaaaacaaacaaaa

SEQ ID NO: 2581 - DNA, 165 bp, Homo sapiens
  misc_feature (1)...(165): n = A,T,C or G
taactgtgaaaggaggncaccagaccctgcnagacctccattggntgncgtatgnctcaagagccncaccggtggcanaacacggngatctgtntgcaccangcagagctcactggaagatttcgaagattcaatatgaaacacagatgtaaatgtaaatgctca

SEQ ID NO: 2582 - DNA, 165 bp, Homo sapiens
  misc_feature (1)...(165): n = A,T,C or G
gggcttaacggcaggaccaaggaatgatatgtacccccataactagncgaaccaggnaagaccttnccccactcntaacccccgcgcctgngatgagaaatctgtcttngccanngggctattgcggcagctcgcgaggnnggcccnacctgctcacgcaggccc

SEQ ID NO: 2583 - DNA, 165 bp, Homo sapiens
  misc_feature (1)...(165): n = A,T,C or G
ccacaaggatagctgtgntccagttttgtntanaactactaggtgaangaacacctcctctcctattnattcccatatctgctttaccgtgctggacacancnttggntctaagaaaatgcagctcaccaggctgtgaccactgaatcacattggagttctctgt

SEQ ID NO: 2584 - DNA, 165 bp, Homo sapiens
  misc_feature (1)...(165): n = A,T,C or G
gctggggggagctctncctgcgctggtncctgactgtacgctctangctganttggtctancctggntacttggaccaactntttnaanntgggnngaagcctcacaactgnaggacctganctcctgttactgccccgctcactgccccctgagtaatggcaat

SEQ ID NO: 2585 - DNA, 164 bp, Homo sapiens
  misc_feature (1)...(164): n = A,T,C or G
attctatgaccatacttctgcgagtcttcaagcctcattcagccancanngggaagaccctgtnnanctcagtacanngtnaagcntgagcagaanatggactgcggnggtggttacatcaaggtgntcccgtctgacctggacccnaagaagatgaacggcca

SEQ ID NO: 2586 - DNA, 164 bp, Homo sapiens
  misc_feature (1)...(164): n = A,T,C or G
atggctctggggcattcngnacgttaagtgtaggagccacgncctngcttgnntggtcggctncantcactggtnntggtcttggaagaancnccggtacatctagccattcgctttagncntcgctctntgtatcacaggaaacaggattacacattcaatga

SEQ ID NO: 2587 - DNA, 164 bp, Homo sapiens
  misc_feature (1)...(164): n = A,T,C or G
actgatggtacccggttnactccttcacntaaatangccaagggtccnaggcntgagnctttaggnaatagtgggtcnccatagngngaactgctaggactaacaccgaaccctgcnagctcctgtctgaggaggtccatcggaaagncacaagaagcactgtt

SEQ ID NO: 2588 - DNA, 164 bp, Homo sapiens
  misc_feature (1)...(164): n = A,T,C or G
tttcatgtaagaccgggngccgttttacatcaactccactgggaaanaatgcatgaagcaccnttnaccatangaaaacaccantgaagactgnacaacagttgaagcagcgggaaatatggnagtgtatgttnacagctgaatnnattaatacctaaatgttt

SEQ ID NO: 2589 - DNA, 164 bp, Homo sapiens
  misc_feature (1)...(164): n = A,T,C or G
gggcaacccgaatttcgtgtgaagactcgggngccgnttttanatacanctaccactgggaaggaatgcatgtaancaccntgtatccatnngaaaacancactgnaaaactggaacaacgntgnaagccagggggaaatatggnagtgtatgttcacagctga

SEQ ID NO: 2590 - DNA, 163 bp, Homo sapiens
  misc_feature (1)...(163): n = A,T,C or G
taagccctttttaagcagcccaaccttcctaccnaggncnacncgaanttntgtaagaccgggtctccgttttacatnnactgccactgggaaanaatgcatnaancaccctttaccttatgaaaacaccactgaagactgaacaacagttgaagcagcagga

SEQ ID NO: 2591 - DNA, 163 bp, Homo sapiens
  misc_feature (1)...(163): n = A,T,C or G
tggctggtgatttaccgngtgcagtgggcnanctnnncntgntncngnaacnttcncttgcctggtagccagaaaaacgggcagtgacctctgnatgggagnatacatgttcccagcaacaggcaggacaaggtacttacatggggaagctcaaaaaaaaaaa

SEQ ID NO: 2592 - DNA, 163 bp, Homo sapiens
  misc_feature (1)...(163): n = A,T,C or G
gctgaacaagaccgataggtatgaaagggcaagcaagtaagaagcagnaaggtgactttggntcagagacgcctgccttgtcctacagnggngactctcctgtgcaacagntgggccacaacagaggnacacctanaagtgtgagcttggccaaaaaaaaaaa

SEQ ID NO: 2593 - DNA, 162 bp, Homo sapiens
  misc_feature (1)...(162): n = A,T,C or G
gcctggtatgttaaccactacatcctaccatgaataccatggctgttntattnctaatagccccaatctggaatcaacccgatgcccatcagnaatagtggggaaaaagctgacaagtatttcagaaagaagaacaaaagcaatgaaattaaaaataaaaaa

SEQ ID NO: 2594 - DNA, 162 bp, Homo sapiens
  misc_feature (1)...(162): n = A,T,C or G
ctgaggctgcacctgtggaagtctttccttgaggctttgagctgagtcctcctgtagccccaaggtaatcccagtagtactgctggtccacagtagttacgaggacaccagctaggttgtgaaactggaccaggctngacatctaagggaccacttgcctag

SEQ ID NO: 2595 - DNA, 162 bp, Homo sapiens
  misc_feature (1)...(162): n = A,T,C or G
gtgactattgagggccctgcccagcacagacttgaantgggttcatgtacaaaccnataggcacccngctacactccntggncatnggcancancaangatagncnnttctnctatgctgnatacgggncctaatgtggcntctggtgacctgcaagtgcag

SEQ ID NO: 2596 - DNA, 162 bp, Homo sapiens
  misc_feature (1)...(162): n = A,T,C or G
tgctgctgtccatgcatatccatagctgctgtncacactggtgcaggagctgttgattggctggagagtatttggacttctaggctggcgagccacttcacttggatcttcatgaatttgnagaatgtgaataaagtgaggttttcttgtacaaaaaaaaaa

SEQ ID NO: 2597 - DNA, 162 bp, Homo sapiens
  misc_feature (1)...(162): n = A,T,C or G
cataccacttccactggaaggaatgcanaaaacaccctnttncttatannaacacncactnaagactgnacaacnttgaagcncgngntatatggcagtcgtatgttctcagcttgacntagatcnatacctaanatgttgtgnttcgactataacagaaaa

SEQ ID NO: 2598 - DNA, 161 bp, Homo sapiens
  misc_feature (1)...(161): n = A,T,C or G
gcttcttctggtgcgcctgangtccgctacngtgtnaataantcttgggccngancaagcagggactgagtgagcagccnacccagantgagaagaggttctaaaantnnaatttncaacaattacatgaactnttacaaccatggtgtacagccacagtg

SEQ ID NO: 2599 - DNA, 161 bp, Homo sapiens
  misc_feature (1)...(161): n = A,T,C or G
tttggctacatactgcatgcactgcagcagcnggagtactntctgcatcngcaaaggntcactgncngaatctgtcctgagnagcaagaggctacttatccngtataccngtgcanantaacagncntattgccnggnatcagatgccctctactggaatg

SEQ ID NO: 2600 - DNA, 161 bp, Homo sapiens
  misc_feature (1)...(161): n = A,T,C or G
agcctgaataaaatgtnccccaccaaggatnctaagcnactccgggtaaggaaacatagnncccaggcccgggctgcagctgtttgcctcaaggaggactcaagcggggtgaagctgctgtttttcctgagaactggacatgcctgccttccatgagaatg

SEQ ID NO: 2601 - DNA, 161 bp, Homo sapiens
ctgggtctagttgggatctccttggctttcgaacactcatctcccaaacatgagtccccaagaagactctgaaacacttcagtccctggtaccctaacttgtgaaacgcatccctcaatttgactggtgggttccctgacagcaaaggagaaaaagaaaaa

SEQ ID NO: 2602 - DNA, 161 bp, Homo sapiens
  misc_feature (1)...(161): n = A,T,C or G
ggtaacacggctcaaccttntgaacttccctccgagcaagctcccttctgncaggctggaccctnactctgggagggaacttnattttggcaaggcatggcatacttgctgctaanganatacannatctatgacnagactttcaaagactgttgatttgg

SEQ ID NO: 2603 - DNA, 161 bp, Homo sapiens
  misc_feature (1)...(161): n = A,T,C or G
ggtggtatttaccgggtgagtgggcaacctggtccgtggtccagnaaactccgnttnctgntantacaggagaacgggcagngcaccttctgatgggtagatacatgttcccagtaacaggcagggacanggtacttacatgggaagctcaaaaaaaaaaa

SEQ ID NO: 2604 - DNA, 161 bp, Homo sapiens
  misc_feature (1)...(161): n = A,T,C or G
ccctggtgccttctgcaacaaactgtaacaganngccangantccatccagactgctacagcaccactcaggtatcggnagtggcantnancggaantncgcaagcactgctcangacanctaagctggtgtccttggaccaaantcctcattaaaaactg

SEQ ID NO: 2605 - DNA, 159 bp, Homo sapiens
  misc_feature (1)...(159): n = A,T,C or G
gggctggagagtatggctactngcttaagcaggcnactgangtggtcttcccgcaggngccngagnncaatgtanccagcnnccacatgggnggctcacaacacatcctgncacaaggaatnngactccctcttgtggagagngctgaagacagcgtac

SEQ ID NO: 2606 - DNA, 159 bp, Homo sapiens
  misc_feature (1)...(159): n = A,T,C or G
ctttgatcagaaagagactgcttttattagnnagnctgcttacnatgctggtgtggccgnacccnagggctttctccgtacatggtgaaactctnnattggagagctatattacnngnnagnaatgaataaaggcntcatatgctttaaaaagaaaaaa

SEQ ID NO: 2607 - DNA, 159 bp, Homo sapiens
  misc_feature (1)...(159): n = A,T,C or G
acttgccatgtgactnagtgggtanacataagactncncattgcgtctctntgcaaggcccctnggtnnaaantctncaggcagacncacatgcgtggcancactaactcactcgcancacatgaggattatgacggccctcttctggtgcgccttcca

SEQ ID NO: 2608 - DNA, 159 bp, Homo sapiens
  misc_feature (1)...(159): n = A,T,C or G
tacaccaggctgcgctagaanctnagaagatcgacctgctgtntctaccctntgctgggactagaaggtgggcaccacttccnccctacntgacangangattanacngnaccatgtctttnnctctgcaancttgcctggagtttactgatgttcttt

SEQ ID NO: 2609 - DNA, 159 bp, Homo sapiens
  misc_feature (1)...(159): n = A,T,C or G
tcttgcaggaggaaatctggctgcncagaaatatatcngattcncctatggtgaaggatatcctcaaggagcaggaatagcaaggaagggcctcatangctgccatactncncangtactacgggtttgttggactcacgaagtaggttttggatgcaa

SEQ ID NO: 2610 - DNA, 159 bp, Homo sapiens
  misc_feature (1)...(159): n = A,T,C or G
attatcacctttacagcaatgatgaagtccgccaagcttccacagacagtgaagacgctttcagacgtggaagatcagaaagagctggcctccccannaagccccnagctcaggcagaaggaggtacaggangaactttttgaaccagctgacctcagt

SEQ ID NO: 2611 - DNA, 159 bp, Homo sapiens
  misc_feature (1)...(159): n = A,T,C or G
ggcaactgccgattcacattgggtaacanccagtgcacgaaatggtgcccgtggcagcaggtcctcctaganctnctccntaaatcccctgtagcttnnngtgcgntcagcngcactgggcgaganaaaaccacctgtctaantaccagggggaggtgg

SEQ ID NO: 2612 - DNA, 158 bp, Homo sapiens
  misc_feature (1)...(158): n = A,T,C or G
tgaggacctccgaaaagtttntgcaagncaagcagactcngtagttgnaggatgnatgcccagncancatagccctgggttacatggngcatgactcaaaaaaggcttaatcatgaanagatgcttcctgcagtggttcctttctgatgaaaggataa

SEQ ID NO: 2613 - DNA, 158 bp, Homo sapiens
  misc_feature (1)...(158): n = A,T,C or G
aggaagcggatgtatgatatgagaaaataatgagnatcccggntgctggagcagcatggcttnagggncnaaaaganactgggctgcgtntngcagaggacgccgtanattgagatgcccattcatccatatgatganggngtgcacaactgttaaca

SEQ ID NO: 2614 - DNA, 158 bp, Homo sapiens
  misc_feature (1)...(158): n = A,T,C or G
cttactggaccaacttaacattggtgtacgnacncangggncncatgagangagcgtgncttgtgaatgactgcngaggngnaacagcgccttgggaaggctggnctgtacgctccnggagngactantagggaggaagcccctgacagcagagggtg

SEQ ID NO: 2615 - DNA, 158 bp, Homo sapiens
  misc_feature (1)...(158): n = A,T,C or G
ctggtcaataattggactgncacctgccaggctgggaactntttcacaccccaagcaaggagccactccagaaaccangaacnnggctcaatggccaggngctagttggnaaatagcttatacagaaataaaaccaggaccntatggaaaaaaaaaaa

SEQ ID NO: 2616 - DNA, 157 bp, Homo sapiens
  misc_feature (1)...(157): n = A,T,C or G
aaggacgaaacctttgntagtcttcaaaanctgcggacatattcctgnctctgcctntccaagtgctggcattnnagacatcccaccancagaactnannagnnatgggaaccgaggccttntggaagaatggccagagttcaggcgcatccttaaa

SEQ ID NO: 2617 - DNA, 157 bp, Homo sapiens
  misc_feature (1)...(157): n = A,T,C or G
ctgagggagcctgggcccgangactctgaccatgaaatnacctgctttnggggcctgcttcagttncccttacntaangtacatngnnganttagcatctccacataaanttgtccccncctganaaagaaaaacgatcttggtttattgctgatgg

SEQ ID NO: 2618 - DNA, 157 bp, Homo sapiens
  misc_feature (1)...(157): n = A,T,C or G
ctggcagtgcatggtacnctaantcncggacctgcccgggccnatatattaagntncnagctggtcntgnntatgnanaccaagctggcctcaaatagacaggagcanctgacagcctgagtgctgggattaaaggccatgtgccacaaaaaaaaaa

SEQ ID NO: 2619 - DNA, 157 bp, Homo sapiens
  misc_feature (1)...(157): n = A,T,C or G
cagctgtcctgtgccattgtggcttctatatgtngccacatgccacacgtanatgtggtgtntattnccaagtctgngtctactantctggctctcagagtcgacagcacacactnagnccctttaccaccaggaagtaccgttgggtccggactga

SEQ ID NO: 2620 - DNA, 156 bp, Homo sapiens
  misc_feature (1)...(156): n = A,T,C or G
aactcctgtgctgggaactantccctgntgtnctgggggactatctgnagcccttgatgactgatnggatttccctgcttatttataacagtgtcaggtgcaatgccgtagccttgggtgtctcacattaaagtacagcaagctgaaaaaaaaaaa

SEQ ID NO: 2621 - DNA, 156 bp, Homo sapiens
  misc_feature (1)...(156): n = A,T,C or G
tacataccactaccactgntaaanaatgcatgtaagcaccnttnacctattanaaaacancantgaaagaactgnnacaaagtngnaagcaggggaantatatggcagtgnnatgttcacagctgaataaattaatncctaaatgttaagatacaa

SEQ ID NO: 2622 - DNA, 156 bp, Homo sapiens
  misc_feature (1)...(156): n = A,T,C or G
ttttgcttcattgctctntcactgccacctncctaanatgnctggggttggcttacactcagcaacncccgttctttngctgggtgcanaangaacnanccaagnacactntagtacacnccaggtactgtagcttgcaacttgcatttacccaaa

SEQ ID NO: 2623 - DNA, 155 bp, Homo sapiens
  misc_feature (1)...(155): n = A,T,C or G
cagttctcatgcatgcnccccctacactggacgatntannngtcctaccanagntacncaaggcgtcctnctntccccactggctgccagatgaatccatcnctcctgctacatatanagctgaagccatgcttcnctncatgcatactctttgc

SEQ ID NO: 2624 - DNA, 155 bp, Homo sapiens
  misc_feature (1)...(155): n = A,T,C or G
ggaactgtgagccaaaanataccctttttttatgttnngaggacagatancaaatgcctgggctgtctggaaggacattcaactatggancccctgggagtgnggnactggactntncaaantgtgagccaanagataccctattctctatgtga

SEQ ID NO: 2625 - DNA, 155 bp, Homo sapiens
  misc_feature (1)...(155): n = A,T,C or G
tttttaatgactgtagactantaatggtaagtataaanctgtccttctgagttcctgtgcatatggcttctgnttcgcttcctgncccaaggatcctgccttaacttcctgccctngcatcacangctgtaataaaccctttcctccccaaattg

SEQ ID NO: 2626 - DNA, 155 bp, Homo sapiens
  misc_feature (1)...(155): n = A,T,C or G
gacatagacgggtacangtaanggaaaggcacttcaatacggaaacagaacttntggggaaatcncnaagaaagnnnctggnaatacannatgngaatgtaagtcacaaatgctgcaaacatgtacctgacgggttgtncttcatgctctataca

SEQ ID NO: 2627 - DNA, 154 bp, Homo sapiens
  misc_feature (1)...(154): n = A,T,C or G
tgaggtttttggcccttgaccnaggtagagttatttggggagaagctnaactgaggaaagtgcctccatcagagtggccttgggcaggtctgngancattttcccgnttnctgattgccatgggagggccccacncgntggacctgcgatccat

SEQ ID NO: 2628 - DNA, 154 bp, Homo sapiens
  misc_feature (1)...(154): n = A,T,C or G
gggggcctgcacgctacctttcaccatggccttgcagagtntgacggactatngncaanaccanagntgcacttgnggggnctgcttactcacaaataaggnccnaaaatagncccaaaanatnattccnancacacaaactacatagtggtga

SEQ ID NO: 2629 - DNA, 154 bp, Homo sapiens
  misc_feature (1)...(154): n = A,T,C or G
taggatatatcaggctatacctaccaacaacctgggtaggnggtaagtcngcgncaacacnagntcaaggntcatcctgtgctgtgctaacaaaccgangggaggcctgcagttacantcaatcagcctctctccctctcaaaaaaatcatata

SEQ ID NO: 2630 - DNA, 153 bp, Homo sapiens
  misc_feature (1)...(153): n = A,T,C or G
gaacaacttggcagangangttccagggcgactgtaacttcaagtgtngngctttancggcccgggcaagcnacgctcctttacccnctgnanccnacttccagtaatgtgttcattttaaatacttaggaaacgaacccagtgtcaaaaaaa

SEQ ID NO: 2631 - DNA, 152 bp, Homo sapiens
  misc_feature (1)...(152): n = A,T,C or G
tgaccattattcttaaggaganagactgaggaagagctctttttatgatgatcaggtacgtggaacctccgtttgntgantccattgctnatgtaggacaaangaanggaaaagngccntggcaaannnaaagtttgctcatatcattcgga

SEQ ID NO: 2632 - DNA, 152 bp, Homo sapiens
  misc_feature (1)...(152): n = A,T,C or G
catacaactaccactgggaagnaatgtcatgtaancancngtatacctatnangaaaacaccactgtaagcactggaacaaagttgcaagccngggaggaaatatggccagtgtatgttcacagctgnaatanattaatacctaaatgttta

SEQ ID NO: 2633 - DNA, 152 bp, Homo sapiens
  misc_feature (1)...(152): n = A,T,C or G
gctcactcaccccttncttcctgacatggnacttggcaanaacgtntgcntntagngatgcttgcttcaaatntgtccctgacggnagaggcttgtacgatgttccgaangaatatgcttctcaaaggccntatctttgggtgtggcaccgg

SEQ ID NO: 2634 - DNA, 151 bp, Homo sapiens
  misc_feature (1)...(151): n = A,T,C or G
cttttcctctgtcccttcctctctttcctttcttactttcccttcctccttatctacttcctgcttccccttcattcccttttctcttttttcattaccttttgatctccattggngtgtgggtgtgattgattgattgattgattgcaaa

SEQ ID NO: 2635 - DNA, 151 bp, Homo sapiens
  misc_feature (1)...(151): n = A,T,C or G
gcagtcgttggctaagtctgatgaancccgangtaagaggagggctgaggncanctcgaagcctcttcgtgcccctgaaacantgctgaccttnnggnatcantaacgggtcgccggngcatgancagagaagggcaacatctcttgcctc

SEQ ID NO: 2636 - DNA, 151 bp, Homo sapiens
  misc_feature (1)...(151): n = A,T,C or G
gtgtggggggactcatatgttacatttggnaagcgagtagtgcagctgttggtgtgaatgctgcgtgggaagaggctcccggccatcctacagactgtggaccagcaggttctaggattggntgccaatggtgatggcgacaaaagtcgag

SEQ ID NO: 2637 - DNA, 151 bp, Homo sapiens
  misc_feature (1)...(151): n = A,T,C or G
gtcaggaaaggcaccatgctctgtagcatggaccattcttgattctgccagcaccgtngggnacgctcagcacncaacctgnngacactactntgcttnnttnacancaccnngcaggatncactgttgctctatgggagagttagtagca

SEQ ID NO: 2638 - DNA, 150 bp, Homo sapiens
  misc_feature (1)...(150): n = A,T,C or G
ctctctgtcgtggttgggtctagctgtgaccctttggacggnccctcttntggggcgctctagtgaccgntcccctcgtgnggccgtgcggncggctgtcgggctnncggcggggggcnagggagcctggcgccctctcattcctattgt

SEQ ID NO: 2639 - DNA, 150 bp, Homo sapiens
  misc_feature (1)...(150): n = A,T,C or G
cagtttttggtctgccanttggaatcgctgngccaacnggnanggggacaccgngccctgntttgtnccngctttgtgttgaggccgtggataacaaaaagtctntcacgnggtatggtctttaccgggtgantgggaacctgcccgtgg

SEQ ID NO: 2640 - DNA, 150 bp, Homo sapiens
  misc_feature (1)...(150): n = A,T,C or G
cagaccgggccggctggcacagggtaggggcggnatccagccggccgntccgccccagctnggaccnctcactantgccgcccccgcttgtgtgttnccagnattnaattgnattctccggaanagggagctnctttgcaaaaaaaaaaa

SEQ ID NO: 2641 - DNA, 148 bp, Homo sapiens
  misc_feature (1)...(148): n = A,T,C or G
cggtagacaaaccacaggacctgcacggggctgctccaggncctttgnatgatatatttatggcttaacngtttagngnntncccacccntcgacccgattcntgagtgngcaaaccagtgatctctgntccttgagcctcaaataaa

SEQ ID NO: 2642 - DNA, 148 bp, Homo sapiens
  misc_feature (1)...(148): n = A,T,C or G
ctgatggctctaaaaaaaggaagaaaatttctgctctcctgcaaaatgctaaaaggaccaagacaagnaaggaactggaagattttgataactgatggctgatgaanatgaatgnacaatttctttcacgaatggaacatctactttg

SEQ ID NO: 2643 - DNA, 148 bp, Homo sapiens
  misc_feature (1)...(148): n = A,T,C or G
ctagtcagcagtgatgatgaagagcctagtacctctcacagtgatgngaattctnnacgcnnaaactntatnctatcaccagaaggnatnatagttgctttaactttggctcgctctggcccgccatgttgnagtatgaaaaacaaca

SEQ ID NO: 2644 - DNA, 148 bp, Homo sapiens
  misc_feature (1)...(148): n = A,T,C or G
agactcttgttgttcncgngcccatccttacctccccagaggatacccgnnattgtgtcaggnccggggnaccggnctatgacaacaactancactgncaaacaatgtcatgnagancaggctgnaancatnagaaaaacacgcactg

SEQ ID NO: 2645 - DNA, 148 bp, Homo sapiens
  misc_feature (1)...(148): n = A,T,C or G
cagagcattcccaaccangcnctgntctgatttgcatattgactcacgggactttcctttactggtctacnnaaaangacncaacagggtcnttttnggaacagctttccctcagcccgagaagaancnntagtttgccttttagctt

SEQ ID NO: 2646 - DNA, 148 bp, Homo sapiens
  misc_feature (1)...(148): n = A,T,C or G
actgcctggaatagatganttcaanctcgncncccgngggatcgaagcncctattctgaagttcctattgtntanaangnatangaacttctcgacctgcntgcatgcaagctgggggggactgacgtcctagaagggagtgagggaa

SEQ ID NO: 2647 - DNA, 148 bp, Homo sapiens
  misc_feature (1)...(148): n = A,T,C or G
tgagcacatgaattcagggctaaggnactccnnggaatcagaagacactgcccccctncccccactatggtttgctggaggctactttgacctttnttttgannacagnngnctctgcttcttttnttaggtggagtacccccaccct

SEQ ID NO: 2648 - DNA, 148 bp, Homo sapiens
  misc_feature (1)...(148): n = A,T,C or G
gccccttttaatggccaggannttnggaacgggccagaggccacgcggatttgcngaagactangaggcccagcacnggntctacaacaagggagttttcaggngngggaacactagattatacagnaaaaaccctgttctgcgaaaa

SEQ ID NO: 2649 - DNA, 148 bp, Homo sapiens
  misc_feature (1)...(148): n = A,T,C or G
ctgtactgccaggactgnncttgaaactccacatncctctattctccttagatgctnggtattacaggttnctctgtgtacatcctgggaattgctntctanaccaggctagcctggtanctnaananatntacctgcctctacctag

SEQ ID NO: 2650 - DNA, 147 bp, Homo sapiens
  misc_feature (1)...(147): n = A,T,C or G
gtacctgtggcacaantccnnactancacactanggccggctnacacncattttcctaatgancanaaggactnccctcttctggtcttcacacccncatgtgangcaaactgcngtatacatatngaataaataactctttggttc

SEQ ID NO: 2651 - DNA, 146 bp, Homo sapiens
  misc_feature (1)...(146): n = A,T,C or G
cctgcgccctggaatgaactgccggacgagncagggggaggtntcganantggccacgacggggngtccttgnacaagtnggctcaangttganactcangccggaaggaactngatgntattgggcctaagggccgggcaaagga

SEQ ID NO: 2652 - DNA, 146 bp, Homo sapiens
  misc_feature (1)...(146): n = A,T,C or G
tgaggagaaggaggaaggcattgccttgacaccncggnatgactcagcgtaattggattgacagaaaagtcaagataattgtaagatccctcaccatcaggattatcctaactgggaagaagaaatacatatttccccccctagaa

SEQ ID NO: 2653 - DNA, 146 bp, Homo sapiens
  misc_feature (1)...(146): n = A,T,C or G
aactaccactgggaaganaatgtcatgnaancacncnttataacattaggaaaacactcactgtaagactggaacaacagntgaaagcaggnataaatatggnagtgtatgttcacagctgcaatnnatnaatacctaaatgtttg

SEQ ID NO: 2654 - DNA, 145 bp, Homo sapiens
  misc_feature (1)...(145): n = A,T,C or G
cgctgcctcgcgctacnccaggcggcatgngaaagtacacnatgtcgaaaacattcactntctcgtgctgagaaggggannncataacnctcattgacgcttgngaaggcactagcgtatcacnggggcggccccataacttctc

SEQ ID NO: 2655 - DNA, 145 bp, Homo sapiens
  misc_feature (1)...(145): n = A,T,C or G
tgttcgaggctcattttctttacaaaganacaaattttttttnggaaaacnttaagatnatnanagnaagnaagnaaaggnaggnaggnagggagggagggaaaaaaggnaggtagcaaggttgnaaggttgtaagggagtaagg

SEQ ID NO: 2656 - DNA, 145 bp, Homo sapiens
  misc_feature (1)...(145): n = A,T,C or G
ctccacccagaaccactngctcatggtancctntgacgtagaattatttaaaaggaacgagggggatcanacggngctcattcttgcatgcaaaagactncacagaaagtcttacggnaatganaaacgatttttttgccctcct

SEQ ID NO: 2657 - DNA, 145 bp, Homo sapiens
  misc_feature (1)...(145): n = A,T,C or G
gggggggggctggggggcggncccntgttctgcctncatgctcggacnggaaaatacgtattaccttcancangttcttggccttgggcanactctggggtagggaagaccaatgnactctaccantacactgatggcaagttca

SEQ ID NO: 2658 - DNA, 145 bp, Homo sapiens
  misc_feature (1)...(145): n = A,T,C or G
agtccagcactcactgtcaatcctgccngggtgcacaccttccctaaannaactgtcttgcgatggtctgaacttcagcttcnttcgtcatcaccatgtacttctttgggaagtatccctgtttcagtcatttgaagcatcagca

SEQ ID NO: 2659 - DNA, 144 bp, Homo sapiens
  misc_feature (1)...(144): n = A,T,C or G
ccctacccccatcctgaaaacctgcttgacttcggngtggganctttctctgctgcatttngatgctgctcacncccactgctggtaacctagaaggnagccncacacgtgcacactttctactggaccagaacattattcggc

SEQ ID NO: 2660 - DNA, 144 bp, Homo sapiens
  misc_feature (1)...(144): n = A,T,C or G
ctccctttggccgtgggntgtgccccctgctctaattctggnactgtccggctccaaagagcaagaggtncagannncnatgttacctncctgcantgtntacaccatgcnacncntctggngatcgcaagatggtttatcaaa

SEQ ID NO: 2661 - DNA, 143 bp, Homo sapiens
  misc_feature (1)...(143): n = A,T,C or G
acctgaggtgctgttggaaanntnggcagaaacctgctcataggcannatgantnctatctacttcangtaggctcccgggatgatggttcacagcccagcttcagagcccgcaaggcggacttgaattgcaatgctctcatt

SEQ ID NO: 2662 - DNA, 143 bp, Homo sapiens
  misc_feature (1)...(143): n = A,T,C or G
gtttctgcctatcgcctatnccagccggtgagattnctctcctgngccctaagactgggactcccctcatggctaaccatcangacctaagggatncaaatgtaacaccaaagaaaacgttttgctcccaaacctaccttaaa

SEQ ID NO: 2663 - DNA, 143 bp, Homo sapiens
  misc_feature (1)...(143): n = A,T,C or G
gacctgtccatctggagaggtanctcatgtgtgggagactggncntgatnngtttgtnngaaagngtacccctganantttggaagagcactccagcgctgnnaactgaaagggctgntccatcagctctagcatgactcctg

SEQ ID NO: 2664 - DNA, 143 bp, Homo sapiens
  misc_feature (1)...(143): n = A,T,C or G
gtcaacataacaccanacacantgtantactgactcgaaagttataagnggngngtaantctggcatgtgtgannccacaccagngtgactagnanttaactacactaatngtggnatggtaaaccctgctgggcagaaaaaa

SEQ ID NO: 2665 - DNA, 143 bp, Homo sapiens
  misc_feature (1)...(143): n = A,T,C or G
ccatacctcgttgctgccntgactatgaaactgtaanctgaccntgggtaggaaacttttgnaggattcncctgnnttcttgnggaggactnactcaacccngaagctncccatcctgttgaaacangagcccttccttctct

SEQ ID NO: 2666 - DNA, 143 bp, Homo sapiens
  misc_feature (1)...(143): n = A,T,C or G
ggccttgcctggcctggaacttgctgcatagactatnctcaaattcatgtaaaacccaactgcctctttctggggattaaagggcatgtacccataaatgcccagtgcacagccatgctttccacttccagactccaagggaa

SEQ ID NO: 2667 - DNA, 142 bp, Homo sapiens
gtatttctgcctgtgctcccgccttctggcaatgactgggtttacaagaagggtaccacatgcttggctttggtagctgttcctggtaaacacatctcgtcttcacccggcatattaaagcgcaaccgtaggaaaaaaaaaa

SEQ ID NO: 2668 - DNA, 141 bp, Homo sapiens
  misc_feature (1)...(141): n = A,T,C or G
acatgatgcaaagagcatcaacctgcttcctgaccgagtgctgggcaccccatcngtgcaaaatggtgcagagctggtgnggctccnnctcnnatgngncacacacnttcacatancncanccnagttcctatgagtcttg

SEQ ID NO: 2669 - DNA, 141 bp, Homo sapiens
  misc_feature (1)...(141): n = A,T,C or G
gggcagtactttgggatacccagtctcaagtacccagttctcagntagtcgcgactcacctactgcaatctggctntaactcctgctcacgacgactggatcttcttattcccccttgctgccaacttttttttttacttt

SEQ ID NO: 2670 - DNA, 140 bp, Homo sapiens
  misc_feature (1)...(140): n = A,T,C or G
gcgttacctttaggggatttgaatgtactgtncttgtctgnnttttttgtttangatggcntanttttcacggcccagganattagncngggaagggctcanaaagncagtatctgatttagttcctatgtgaactaaat

SEQ ID NO: 2671 - DNA, 140 bp, Homo sapiens
  misc_feature (1)...(140): n = A,T,C or G
agactcttatctggaagctacttccctgctctggaaatgngngaattnaggnntaacttgaatctgtatttcctggctgtgaccactctcatattttgctncatagtaaactatctnctatcctcttttgaaaaaaaaaa

SEQ ID NO: 2672 - DNA, 140 bp, Homo sapiens
  misc_feature (1)...(140): n = A,T,C or G
tctgcccctggtgggggttcctcctggtacctcctncccaacatggaccagttaaccaggtcggtttacagtcatacccaggtcacaagtggnagggaggtggtggaacatncatgncgtgngtaattgtggaacaaggt

SEQ ID NO: 2673 - DNA, 139 bp, Homo sapiens
  misc_feature (1)...(139): n = A,T,C or G
attagcacagttcattatgttgctggcacagcangnaacagnantctgttcagctggcgaactccttggttgccctagggacgtggggatcttgaacctagtttcctcctgtaattaaatacagtctgaaacaaaaaga

SEQ ID NO: 2674 - DNA, 139 bp, Homo sapiens
  misc_feature (1)...(139): n = A,T,C or G
tgtaagaccgggtcaccgntttncatacaanctccactggaaanaatgcatnaaacaccntttacnatanaaaacaccactgaagactgancaaagntgaagcaccgggnaatatggcantgtatgttcacagctgaat

SEQ ID NO: 2675 - DNA, 139 bp, Homo sapiens
  misc_feature (1)...(139): n = A,T,C or G
attgtgtaagaccgggntccggtttncanccactccactggaannaatgcatgaancaccntttaccttanaaaacaccnctgaagactgcacaacagntgaagcaccgggnaatatggcagtgtatgttcacagctga

SEQ ID NO: 2676 - DNA, 139 bp, Homo sapiens
  misc_feature (1)...(139): n = A,T,C or G
ccactgggaaggaatgcatgaancaccntttccatgntaaaacaccantgaaagactgggacaaggntgaagcccggganatatggcagtgtatgttcacagctgaataaattaatacctaaatgtttgaaatgcaact

SEQ ID NO: 2677 - DNA, 138 bp, Homo sapiens
  misc_feature (1)...(138): n = A,T,C or G
gtttccctggaagctcaatagcctctggaggattnctgtggggagctatnnctgtcctgncaactcgctctanagaagaggctgtcctnnanctcacnnatttgcccgactgtgcctcccatgtgctgcgattaaagg

SEQ ID NO: 2678 - DNA, 138 bp, Homo sapiens
  misc_feature (1)...(138): n = A,T,C or G
aactccactgggaagnaatgtcatnaaccaccntttacctatangaaaacaccactgtaagactgnacaaagttgaagcncaagnnatatggcagtgtatgttcacagctgaatanattaatacctaaatgtttagat

SEQ ID NO: 2679 - DNA, 138 bp, Homo sapiens
  misc_feature (1)...(138): n = A,T,C or G
gactctaaggagggaagagttaatagacnccntnaaantanncatttcnggaggccangggcagagcctgaggctctgctaccnggctggaggcctggctggatgtaacgctnatcacaganctggagagtgctgtga

SEQ ID NO: 2680 - DNA, 138 bp, Homo sapiens
  misc_feature (1)...(138): n = A,T,C or G
agtttgcttcccatgcagtcatacgaccacggggcacgcccagcttctgcttactgcctgcttggtaaacaggngactgcantcttggaccagcaccacagnagggattcaggtntanagaggcagctgccactttag

SEQ ID NO: 2681 - DNA, 138 bp, Homo sapiens
  misc_feature (1)...(138): n = A,T,C or G
taacaaaacctgcacatgttnggtgtcaggaatcaattntnaggctaaaaacaaacnccttcctgtcacatggggtatnagagtgngaannggtancacntacattnacctgataacnttaatctttttaaaaattaa

SEQ ID NO: 2682 - DNA, 137 bp, Homo sapiens
  misc_feature (1)...(137): n = A,T,C or G
tcacagcataagtcacngtagcatttacacnaaaanatgatgcagcngngtgnnaactgtaatnnctcccagaatagcanganacatccccaagttcccagcagcagcgatgaaaccagctcgtgttcctttcaact

SEQ ID NO: 2683 - DNA, 137 bp, Homo sapiens
  misc_feature (1)...(137): n = A,T,C or G
cctccctgataatgagggctnattgaaatgatntntgnggncttggacccaggccaatcaactgnnanagctcatgataantcgcaatgcattattgagagtaatggaagaanncagngtacaaatagccagggtgc

SEQ ID NO: 2684 - DNA, 137 bp, Homo sapiens
  misc_feature (1)...(137): n = A,T,C or G
atttgtgtgagccgggggccgnnttncaacaactccactggaagnaatgcatnaancacccgttacctatagaaaacaccactgagagactgaccanngntgaagcagggggaaatatggaagtgtatgttcacagc

SEQ ID NO: 2685 - DNA, 137 bp, Homo sapiens
  misc_feature (1)...(137): n = A,T,C or G
tggggcaactccgaatttgtngngaagactcgggntccggnttncatacnactaccactgggaaggaatgtcatnaancacacntntaacctattangaaaacaccactgtaagnactggaacaacagttgaaagcc

SEQ ID NO: 2686 - DNA, 136 bp, Homo sapiens
  misc_feature (1)...(136): n = A,T,C or G
gcattccaccaaaaagctatgatggtacaacaggcccacgtntgngcccaggcaaggctcanctcgctgctanggcgatcccttcactagncctggattctggatgtgnggaaantgnagagaggggtaagccaat

SEQ ID NO: 2687 - DNA, 136 bp, Homo sapiens
  misc_feature (1)...(136): n = A,T,C or G
tactgctgactgatacgccataancaccttctgtattactcngtacntnacccnaccctgcatcggncctgcctgngganaggtgncangccgngggggagaaataaanaccgatgaagaacgtgaaaaaaaaaaa

SEQ ID NO: 2688 - DNA, 136 bp, Homo sapiens
  misc_feature (1)...(136): n = A,T,C or G
ttcatttaccgtactacacaggantctgctacaagaaatttccacaaggtacttcatgtgnatactgtatgnccctacttactgnacctgctgcaggaccacatgggctacacacataagtaaattaacttaaata

SEQ ID NO: 2689 - DNA, 135 bp, Homo sapiens
  misc_feature (1)...(135): n = A,T,C or G
acccttcctggaactacttccctgttggtaagtggnaatttggggtaacttgtaatgctgtgtttcctggctgtgnaccgctctcatattttgctccagaaataaactatctcctatctcttctaaaaaaaaaaa

SEQ ID NO: 2690 - DNA, 135 bp, Homo sapiens
  misc_feature (1)...(135): n = A,T,C or G
tgaagtaggagcctgggcntaggcctanttacttcttgtggaactctcaaggtcggacaggtaacaaanncagganctncnnagcaaaaaacnctttcgggacntncacnnaccgggttaagggcagatgagaaa

SEQ ID NO: 2691 - DNA, 135 bp, Homo sapiens
  misc_feature (1)...(135): n = A,T,C or G
tatgcaaacctcatggtagcatcaccttaggntaatgtctacaagtagcncgctatgagnagtatncantggcaatcacaatgctttnttgttcagaaactattgccaggatgttggnatatcctgctttctgga

SEQ ID NO: 2692 - DNA, 134 bp, Homo sapiens
  misc_feature (1)...(134): n = A,T,C or G
cctatcctgatgttgaggcattcctttgctgnaaganagancctgctcctttggantccancgcngcccnaanacccctgaggctagccagccttggngtnttgcctttccatcngnagacagctgcttttgga

SEQ ID NO: 2693 - DNA, 134 bp, Homo sapiens
  misc_feature (1)...(134): n = A,T,C or G
tgaaggagacccaatanctcacagcngagggncccggnnttnnntccacaaacttcccgtcgctctnacagtaataccttgantgatntaaaantgtgggagtnagtcctacccttccaccatgaaaaaaaaaa

SEQ ID NO: 2694 - DNA, 134 bp, Homo sapiens
  misc_feature (1)...(134): n = A,T,C or G
aagtaaacacccctcanattgcanaacaaaacaggtaagtaaccagctggcaggcactgnggaaaagttttgtaattctggcaacacnttngngcnnncanngtacnctctcntctgtttatccacttgcaaga

SEQ ID NO: 2695 - DNA, 134 bp, Homo sapiens
  misc_feature (1)...(134): n = A,T,C or G
gctgctgtaggtgtgactggtaaatgacatcactaccccgccaaacaagggagccaccaccaanccctgaaaagaaagcaaannctttggccaccactcaacctnacaggacttnaacatcgaaggccaaaaaa

SEQ ID NO: 2696 - DNA, 133 bp, Homo sapiens
  misc_feature (1)...(133): n = A,T,C or G
ctcctacacgactccgctgccctctggnacncaccncatntgctgtactntgatgagagngnaaacaggctnctaanagcatangaaaatataataatgtaacaaganaatttctaacataataggacaaaag

SEQ ID NO: 2697 - DNA, 132 bp, Homo sapiens
  misc_feature (1)...(132): n = A,T,C or G
tccgcagttgctattccggaactagccccttcnctntgaagcatacacaacttaccagactctgcnggcatgctagctggganngnccnnaanactaaaagnttggganaattcttggcgagggctcttttt

SEQ ID NO: 2698 - DNA, 132 bp, Homo sapiens
  misc_feature (1)...(132): n = A,T,C or G
tgcgtacgagaattcggaatttctgtgngactncncagtnantattggggntgtnnacttcgaanccnacanagcagcgcttgctgccttttctanctacttcaagatgatcttcnttctccaaacatagat

SEQ ID NO: 2699 - DNA, 132 bp, Homo sapiens
  misc_feature (1)...(132): n = A,T,C or G
acctgagggggattttgnaggtggcgccgagccntggctcgggacgncctatanttnttgnttgtncnaacctctnaaagagngggnccggacgncaccatcacgttaaaactttcatgaaaaaataaaata

SEQ ID NO: 2700 - DNA, 132 bp, Homo sapiens
  misc_feature (1)...(132): n = A,T,C or G
ccactccactggaaganaatgcatgaancaccntttaccatanaaaacaccactgaagactgnncancagntgaagcagcnngaaatatggcagtgtatgttcncagctgaatnnatcaatacctaaatgtt

SEQ ID NO: 2701 - DNA, 132 bp, Homo sapiens
  misc_feature (1)...(132): n = A,T,C or G
ggaactacttccctgntggctaagtgggaatttggggnaacttgtaatgctgngatttcctggctgngaaccacttctacatgattttgctccagaaataaactatgctcctatnctctttaaaaaaaaaaa

SEQ ID NO: 2702 - DNA, 131 bp, Homo sapiens
  misc_feature (1)...(131): n = A,T,C or G
ctagtaaccttggctacttttaggcccnaaccctgccctgagccngtaaagagngaggtanganngaggaccaccagatattntaanaggaaaaacangncatnntcacgtncttttattctggtacagaa

SEQ ID NO: 2703 - DNA, 131 bp, Homo sapiens
  misc_feature (1)...(131): n = A,T,C or G
tatttgctctgactgcagntactggaccancaatacctnaaacgtctaccgtgacagnggtgagcatgacctgttctactttctanaaagtgccataacacataaaaccttccatatgaaaataaataaaa

SEQ ID NO: 2704 - DNA, 131 bp, Homo sapiens
  misc_feature (1)...(131): n = A,T,C or G
ggctttaaaaaaaaccgaaanaanccgcccnagctcgggccactnantaaaagaccgcccccgntngngngtttccaaagaatnaatngttttntccggaaagggagctcntttgcagggggaacgccaaa

SEQ ID NO: 2705 - DNA, 130 bp, Homo sapiens
  misc_feature (1)...(130): n = A,T,C or G
tctccgatccgctgtgcttgcngcntgggcctatgaactcgcccactgccnccaacacttgacaggaccangtccggcgnnccaggacgatgaanatgccngcnatcttntggatgcccagggacgctgg

SEQ ID NO: 2706 - DNA, 130 bp, Homo sapiens
  misc_feature (1)...(130): n = A,T,C or G
tgaggatgatagctgggattcctccccatncccgtctcntaacttgaggctgctgcttncggctcctctcgcagcaccttcaaggcaagttacttnaaaacagccacacaatanatgcgcacaactcata

SEQ ID NO: 2707 - DNA, 130 bp, Homo sapiens
cacgtgaggctgtgagtcctcggcttcctgctagttgtatgccagtagcaaggcctctccaccgtgatgcacgcttattcttctggaaccctaagctgaaataaacccccttcttgcttaaaaaaaaaaa

SEQ ID NO: 2708 - DNA, 130 bp, Homo sapiens
  misc_feature (1)...(130): n = A,T,C or G
gaggatacacctgtgtgantgtacatgcagcgncatggtactgtcaagtacggtaagagancgcccagnaaaacagactcacaggcctttcagggaaccagnacggactcccagaagagcggaggtgaag

SEQ ID NO: 2709 - DNA, 129 bp, Homo sapiens
acctgagcccaggaatgtaaaaggactttctacagttcacattaaaggtagcctgaggaagacgggaagacttccatcttcaaaaactggcgaaattaataaaggatgactatatcactaaaaaaaaaa

SEQ ID NO: 2710 - DNA, 129 bp, Homo sapiens
  misc_feature (1)...(129): n = A,T,C or G
gcacaggaaagcatgngaataaggaancaagaggaanctgnttaagagacctgcncctggaagcatcctgaggctgcagaaacgctgctcagagctgacccacnacctggagatgagagaggtccagcc

SEQ ID NO: 2711 - DNA, 128 bp, Homo sapiens
  misc_feature (1)...(128): n = A,T,C or G
ctagtttttctcccccttcccccntcctgnaaacctgcttgacttcggngtgggagcttgnctgcngcattgcnantctactcacnctgcactgctggnacctgaggcagccacacacgtgcaccttt

SEQ ID NO: 2712 - DNA, 128 bp, Homo sapiens
  misc_feature (1)...(128): n = A,T,C or G
cactgcctggcaaaactctttatnctngccaacntgcncagnactcctacttannnnatgcntggtgactttctagantgaacttaactgtgtgcacatgccttcatgcntttctgaaaataaaagtt

SEQ ID NO: 2713 - DNA, 127 bp, Homo sapiens
  misc_feature (1)...(127): n = A,T,C or G
actaagtagtcaggggctttgtaattctaaaagttcctgggacataataccaaagcaacgaagacagagtggcaggcagaangggagcctgtgtgtgcacagggcagcaacactggccttggcaaaa

SEQ ID NO: 2714 - DNA, 127 bp, Homo sapiens
  misc_feature (1)...(127): n = A,T,C or G
tgtcccaggaatccattaagaagctgccggccgaggcccggggacgacgctgggggtggactactttcttttcagaggaaagnntgggngattcagcttgnggggagggaggaagcggtaggaggca

SEQ ID NO: 2715 - DNA, 127 bp, Homo sapiens
  misc_feature (1)...(127): n = A,T,C or G
tccgaactacccatatggccggctnacanaccattntgtaatgancanangaacgncctcttctggtcttcanaccctcatgtgnagcaaactgctgtagacntntngaataactaccagctttggt

SEQ ID NO: 2716 - DNA, 125 bp, Homo sapiens
  misc_feature (1)...(125): n = A,T,C or G
aggaaggaccggaganagagccgagacgaacggaccctgtnccgagctttcttccttccgtgantgacaagataccagagatagtgctggnntnaaacttcatccctcgtgactactctggacca

SEQ ID NO: 2717 - DNA, 125 bp, Homo sapiens
  misc_feature (1)...(125): n = A,T,C or G
tatcttctctacctccancacttttgatacaggtatcntgcatgcaancacagaggtttncgggaactcctcgngtggggtanaacactggangcngacgcactgggctggatggacttgcagaa

SEQ ID NO: 2718 - DNA, 125 bp, Homo sapiens
  misc_feature (1)...(125): n = A,T,C or G
atgactggtttctgtgtcagaaccgtggncaagtcctcttcagcagntgcacgatgtattctaggnaaggtcagttgcgttgtaggtccccaacaagactttgccaactggtaatttgttttcgg

SEQ ID NO: 2719 - DNA, 124 bp, Homo sapiens
  misc_feature (1)...(124): n = A,T,C or G
cgtgaagactatgatgacattancaaccaganngacttcatcatatgccttggaggagatggcaccttgctctatgcctcctcactttttacagggcagtgtgcctcctgttatggctgggcgc

SEQ ID NO: 2720 - DNA, 124 bp, Homo sapiens
  misc_feature (1)...(124): n = A,T,C or G
gaaaccctcatggacttgaggcgcgggcatggtncntgcagnaggactttcggaaatccccnccncnagctggacgnccnatngagaccngagncctggcatgnttggctactgggcaccacaa

SEQ ID NO: 2721 - DNA, 124 bp, Homo sapiens
  misc_feature (1)...(124): n = A,T,C or G
gcctggtgcaaatgaccgnctttcttacaactcaaaacagttccctctgcncctggnacaccccggcactctggactagctctgttctcttgtngcctantgtagctcgtgtacaataaaccct

SEQ ID NO: 2722 - DNA, 124 bp, Homo sapiens
  misc_feature (1)...(124): n = A,T,C or G
ttctttttacttttttnatgcccaattttatcatganctttttangantgaaaatatttttttaaatcttttccannnatttaacatctgcatttacttntgctgccataaaattccatgacca

SEQ ID NO: 2723 - DNA, 124 bp, Homo sapiens
  misc_feature (1)...(124): n = A,T,C or G
aggctttaaaaaaaagttgattcngtgcatgagtgcaagttnactactgctgntcaccgttgagagacttacaggtgcttgcctgaactgcaataacnggactcatattattgaaaaaaaaaaa

SEQ ID NO: 2724 - DNA, 124 bp, Homo sapiens
  misc_feature (1)...(124): n = A,T,C or G
ctacagcacgctacgattgctnctgcaatcnngntangctgggcncanctntgctggcgtaaactgcngncggtagcgcctntggtttctacacaaaatgaagcatattttcatgcgtaaaaga

SEQ ID NO: 2725 - DNA, 124 bp, Homo sapiens
  misc_feature (1)...(124): n = A,T,C or G
acacacgtggcacgcttctntactgnaaccactacancttncncgcctgtaatnntcaccnctcccccntncttcatatctaggacgggnaacaggtaaccattttgagcacttgtatcaggag

SEQ ID NO: 2726 - DNA, 124 bp, Homo sapiens
  misc_feature (1)...(124): n = A,T,C or G
cacacgtgtggctttctacgctccancagcaacngnagtcctggannggtnctctgcacttaaccatgcnggtcggacacaccacgctnaagtntagcacagnctattcaaggatggcacagca

SEQ ID NO: 2727 - DNA, 124 bp, Homo sapiens
  misc_feature (1)...(124): n = A,T,C or G
gtgcgagactcgatcnctcgggnagctngtacgatagaggcgtgataananaactcatanctctacgactgtncggggntggcnctatataacgcntgggcgaggcgcataggaaatgcgctac

SEQ ID NO: 2728 - DNA, 123 bp, Homo sapiens
  misc_feature (1)...(123): n = A,T,C or G
ggccgggaccgcccagcnttccggggcggcagcncgggccnncgggcgggcgnnccnngggggcgngggccgcgcccgcctgcgggggcgcggccccccggcnggccgggcgcgcgggccgct

SEQ ID NO: 2729 - DNA, 123 bp, Homo sapiens
  misc_feature (1)...(123): n = A,T,C or G
acctgaggtcaagtcgatagggcncgggacctcagctggtgcngnctttatncctnnacacgacacctacncgggaaccgtgaacatcgccctcctgctctgcctcactttaaaaaaagaaaa

SEQ ID NO: 2730 - DNA, 123 bp, Homo sapiens
  misc_feature (1)...(123): n = A,T,C or G
aactacctgaaggctgacctctgtcctccgcacgcatgctgggacatgtgtgtgcctgcagaaacacacacataggcacacacgcactanntgaaaataaacattattttctaaaaatgaaaa

SEQ ID NO: 2731 - DNA, 123 bp, Homo sapiens
  misc_feature (1)...(123): n = A,T,C or G
agcactgctgaaattttaactacnccaaggatgcctgtccctcccccaccagcacccggcaccgtcaccaacatttgcactcgtgagtatattttctctattcaggttttctaaaaaaaaaaa

SEQ ID NO: 2732 - DNA, 123 bp, Homo sapiens
  misc_feature (1)...(123): n = A,T,C or G
ccgaggctgccataagcccagcaagctggggaatgatgcgctccagccgggctntcnctacggntttggaaataagaactnggacaaatcaatccttttnattaaaaacaacaacaacggcgg

SEQ ID NO: 2733 - DNA, 123 bp, Homo sapiens
  misc_feature (1)...(123): n = A,T,C or G
aaataaactcttcttactgtgctactgctgtnaagaaannactncnncagcgtnggacaccccgggncgatactgcgctagtgntatctttcacngcgnganatagaattgaactagcctata

SEQ ID NO: 2734 - DNA, 123 bp, Homo sapiens
  misc_feature (1)...(123): n = A,T,C or G
gggcgcacactcagacttgancgctagaacttagatgcgttggtgnnttgggnttgccttcacagacatacaggnctgtatcnattgcatgaattctcttcgantnaaaaatcacaaggcgac

SEQ ID NO: 2735 - DNA, 123 bp, Homo sapiens
  misc_feature (1)...(123): n = A,T,C or G
tagatgaatgacctagaagcagtttgttntcacttnganccacctcngncctacacactctgagctggcggctctgnggncaaangcagcagtactgatccnaaatcgttaagaaggcagcaa

SEQ ID NO: 2736 - DNA, 123 bp, Homo sapiens
  misc_feature (1)...(123): n = A,T,C or G
ctgcaggcatatatgttganatctcnggcatcgtgcnncgcagggtggaggggnntanctgtgcccacgactataggangggancattgnaaaaaatctnttncaaaagggcttgatacatgc

SEQ ID NO: 2737 - DNA, 123 bp, Homo sapiens
  misc_feature (1)...(123): n = A,T,C or G
ccgtggtccagaaacnccgcttcctggnttacngancagcggncagagacctctgatgggagcnacatgnacncanaacaggcaagcaaaaggtacttacatgggcaagctcaaaaaaaaaaa

SEQ ID NO: 2738 - DNA, 122 bp, Homo sapiens
  misc_feature (1)...(122): n = A,T,C or G
cccgttttttggggaggaaccnaagnccancagccggagggcgcaccganttttggggggaaggcagnagaaaaaaaccccccgangcccngngccaaagcaaaagaagagacagagaagga

SEQ ID NO: 2739 - DNA, 122 bp, Homo sapiens
  misc_feature (1)...(122): n = A,T,C or G
gtctggcaacactgtactggtgcttaacaangtacctgngntccattccnanttanccactatggatggcttacaaccattgtnctnatgannatncacaacgcncctcttgctgttcttca

SEQ ID NO: 2740 - DNA, 122 bp, Homo sapiens
  misc_feature (1)...(122): n = A,T,C or G
atctcctacttgtgcctggaacacactantgnatccnagatttccctgngcnagnggaaaaccagggtctntganangaactggctgaggaggttaatncgacctggatcacaggaagaaga

SEQ ID NO: 2741 - DNA, 122 bp, Homo sapiens
  misc_feature (1)...(122): n = A,T,C or G
gggtggtcatttaccgggtgcagtgggcaacctggccgnggtccngaactccgtttcctggtagtacagcanaacgggctgtgtacctctgntgggagcatacatgttcccagcaacaggca

SEQ ID NO: 2742 - DNA, 121 bp, Homo sapiens
  misc_feature (1)...(121): n = A,T,C or G
ggcactggtccccaggccttcagccgcgtccagatctgnccctacngcanccgttttgatactgnanactgngtgggcccatngatgcatgcctgacgactacnntggtactcatatggtg

SEQ ID NO: 2743 - DNA, 121 bp, Homo sapiens
  misc_feature (1)...(121): n = A,T,C or G
cctggagacgacttacctgtttggcactgnggacatttggggcaacttgaatgctgtanttcctggctgtacaccnctctcntattttgctccagaataaactatctgcctatctcttttg

SEQ ID NO: 2744 - DNA, 121 bp, Homo sapiens
  misc_feature (1)...(121): n = A,T,C or G
atacaacctaccactgggaananaatgtcatntaancacncntntatacctattangaaaacactcactgtaagactgnaacaatagttgnaagcnagcaatnaatatggcagtgtatgtt

SEQ ID NO: 2745 - DNA, 121 bp, Homo sapiens
  misc_feature (1)...(121): n = A,T,C or G
cctgtacacctggaacctccttcagctgcatccatgcgtgcctcgnangnatccatccctgaggcatcaactgaaaattatggctcctgnagaaagaataaagcacactgttcactgccaa

SEQ ID NO: 2746 - DNA, 121 bp, Homo sapiens
  misc_feature (1)...(121): n = A,T,C or G
aactactgacctgttgncaatgtggnaatttgggagaacttgtaatgctgtatttcctggactnnnnaccactctacatattttgctccagaaataaactatctcctatactcttttgaaa

SEQ ID NO: 2747 - DNA, 120 bp, Homo sapiens
  misc_feature (1)...(120): n = A,T,C or G
acggtcgcgccgcccccagacgacgtcacccacgcgcgcagtaagcggnacgccgcggncaaggatgtctctgccatgcccacgggtacgcacggacgcacggcacggactccacaagga

SEQ ID NO: 2748 - DNA, 120 bp, Homo sapiens
  misc_feature (1)...(120): n = A,T,C or G
aaaggtgctcagcgctccccaaaggtgcccaggcccctgttgaaggccccatagaaatgacttcttntcaangtgaatgacngacggantgttgtgacacacctccccacacactatttg

SEQ ID NO: 2749 - DNA, 120 bp, Homo sapiens
  misc_feature (1)...(120): n = A,T,C or G
gggttctgactatgatggactngacttggcctggganctngctgcntagtactatgctantatccatggaangacccagcngccttgttctgggatnataaggcatgtacccataaaaaa

SEQ ID NO: 2750 - DNA, 120 bp, Homo sapiens
acctgaggtggcgactccctgctctgtgcaagtcccctggaccggctcctgagtagtcccacaccatctgctgggtttgggttctaaactgagtaaagaaagcaagctgaaaaaaaaaaa

SEQ ID NO: 2751 - DNA, 120 bp, Homo sapiens
  misc_feature (1)...(120): n = A,T,C or G
ttgagttcattcccagcaccgacatgggggncttcanccatctgtnatgggacccaatnttctnttctgangnctnangacaangacagngaactcatgccataaaataaataaatcttt

SEQ ID NO: 2752 - DNA, 120 bp, Homo sapiens
  misc_feature (1)...(120): n = A,T,C or G
cgaaattcatgtgaagaccgggnccccgtttttanatacncctnccactnggaaanaatgtcataaaancacacntttacctatgggaaaacaccactgtaagactgcgacaacagttga

SEQ ID NO: 2753 - DNA, 120 bp, Homo sapiens
  misc_feature (1)...(120): n = A,T,C or G
atcctccgaggattggttgnncctgttgcttcgaattccagctgaagctaaccctttaccagaccacgnctctgntaccaaaantttgcgtgggagccccngnctttcctactatttggg

SEQ ID NO: 2754 - DNA, 120 bp, Homo sapiens
  misc_feature (1)...(120): n = A,T,C or G
gtgagctgtgtggaancacaanctctgctctctgtnccgtgcccctcctcatancccccgcactctgagctctnaaaacacacttaactcctgaacacttangcatctatgttcctgaga

SEQ ID NO: 2755 - DNA, 119 bp, Homo sapiens
  misc_feature (1)...(119): n = A,T,C or G
cactccagtgtttttggttctgngtacnancctgggacaggagcctanttnctttcttgnngaactctnnaacggtcgaacaggnaagnatggtctggtatccatatatctactgcctc

SEQ ID NO: 2756 - DNA, 119 bp, Homo sapiens
  misc_feature (1)...(119): n = A,T,C or G
cgacacgtggggagcacagagngggttaaagggtgtccttgtatgcatttggcaaatttcgctactacangaagcncgagtgatttaaattntctaggggccgggtcagaaactccata

SEQ ID NO: 2757 - DNA, 119 bp, Homo sapiens
  misc_feature (1)...(119): n = A,T,C or G
actcgtatctgtgactataggacacgttancgngcgaggaagaacnacaccctacttaatgtactactaggangnggncggncctagatttatcaagtntttnttatacggctacttca

SEQ ID NO: 2758 - DNA, 119 bp, Homo sapiens
  misc_feature (1)...(119): n = A,T,C or G
tgcacagaactgccactggtaagnaatgtatgaagcancnttnanctatnnaaaacactcactgaagactgnacaaagttgaagcagggagaaatatggcagtgtatgttcacagctga

SEQ ID NO: 2759 - DNA, 119 bp, Homo sapiens
  misc_feature (1)...(119): n = A,T,C or G
atccgtagtactccatccagtttacttcctgttgacatgagantnacatcntctccctnttttntcccaaggnagagangagatttttgatgacgnangtntgagaacactttaagtct

SEQ ID NO: 2760 - DNA, 119 bp, Homo sapiens
  misc_feature (1)...(119): n = A,T,C or G
ttcacacaccctccactggaaanaatgcatnancacactccttnccttananaacaccactgcaagactgnacaacagntgaagccgcnngnaatatggcagtgtatgttcacagctga

SEQ ID NO: 2761 - DNA, 119 bp, Homo sapiens
  misc_feature (1)...(119): n = A,T,C or G
agtggcagtacacttttagggccaaggaatgtacatgcatncacacacagctcactgtcttnaaaagaaaaaccgttanccggttgcnctggnctttgnnngctacgtttactgaccac

SEQ ID NO: 2762 - DNA, 119 bp, Homo sapiens
  misc_feature (1)...(119): n = A,T,C or G
ctgtgtggtcgcctggctgncctggcnactacactntgtcntacaaggttggnccactancttcaggncngtacctgtctctgcctcctgaggattaaaagtgtgtgccaccaccaaca

SEQ ID NO: 2763 - DNA, 118 bp, Homo sapiens
  misc_feature (1)...(118): n = A,T,C or G
cagaggctgttatatgcctantaaatgcggcccnntatgcctcagaaggcganactggacaggaacggtgagtgtgaacctataggnctttgtgncctcctcaaagtccttgaaacaa

SEQ ID NO: 2764 - DNA, 118 bp, Homo sapiens
  misc_feature (1)...(118): n = A,T,C or G
acggcggtgaaaaaaaactgctgccnaacatcttgtagaagaaggngggactgctgcntgntgccggnctaggaagcaagcctgcacccctggntngtgagtgcctgcctgggcacac

SEQ ID NO: 2765 - DNA, 118 bp, Homo sapiens
  misc_feature (1)...(118): n = A,T,C or G
ggtcttgctggttatgcccacactggccccaaactgtaactcangntactcctggctactggaactacagcnaannagcaaggtagnaagcagggnagcaagtagggaaaagtaggga

SEQ ID NO: 2766 - DNA, 118 bp, Homo sapiens
  misc_feature (1)...(118): n = A,T,C or G
aaaataccaaatggaaggnggacctgnaacaagttnacttaaaagtcttggggacccaaancnccncactgaaaccaccacacaggttntaananattttgataataaagtaacattt

SEQ ID NO: 2767 - DNA, 117 bp, Homo sapiens
  misc_feature (1)...(117): n = A,T,C or G
acctgaggatcggaacgtaattaacgtcaancataatgctgacgctgggcccctcngnacnngtngagagccgtggattcntgagggcttnaatagttcggcctataccctaccaaa

SEQ ID NO: 2768 - DNA, 116 bp, Homo sapiens
  misc_feature (1)...(116): n = A,T,C or G
ctctcatcaccctgcctctatatggnggacntaatnactggngacagcnaaatcaccagcttnnntcatactgacaggtccaagaggtgaaaatganggagggggggataggaaac

SEQ ID NO: 2769 - DNA, 115 bp, Homo sapiens
  misc_feature (1)...(115): n = A,T,C or G
ctgagcctataaagaagaaatgatattatnctgtagatgaatgaatgcaactggagataatcatattaagcgaatttaaccagtcttgggaaggcctttgttgaacaaaaaaaaa

SEQ ID NO: 2770 - DNA, 115 bp, Homo sapiens
  misc_feature (1)...(115): n = A,T,C or G
gtacagtgaagcacatggtacaaagccctnacatactgnancctntaccctnggtgtcactgtgctgagaagtcactgtggttcccacaggtccatatntatggtggattttatg

SEQ ID NO: 2771 - DNA, 115 bp, Homo sapiens
  misc_feature (1)...(115): n = A,T,C or G
tgagcgctagagccttaacagattccctgnccatggaaacccacggctcaaccttctttggacgatatcgcacatttcctgtatataaacatgacctctaactagaaaaaaaaaa

SEQ ID NO: 2772 - DNA, 115 bp, Homo sapiens
  misc_feature (1)...(115): n = A,T,C or G
ctttgcacgtattcacacaaacantatgcncacattnacacacatttatgnatgcattcacacacacatacanactgttcacattcatagacacangnntacacatacacatgca

SEQ ID NO: 2773 - DNA, 115 bp, Homo sapiens
  misc_feature (1)...(115): n = A,T,C or G
ataagcccttgtttangcagcccaactcttcactaccnatgggnntacccgaaattgtgttaagaccgggnctccnnnttgcatncaactaccactnggaaagaatgtcatgcaa

SEQ ID NO: 2774 - DNA, 115 bp, Homo sapiens
aaacagttggaaacacagtcagggatcgcaactgtaacacgttctgtggcaggagcatagctctgctcatatgcaggactggtcaaatttctgttcctactctagctcaggtagc

SEQ ID NO: 2775 - DNA, 115 bp, Homo sapiens
  misc_feature (1)...(115): n = A,T,C or G
taggagccattaacagtattaccnatacaccanggaanncncggggctnaacgcattctttggacgatntcgcacatttnctgtatataaacatgacctgctaactagcaaaaaa

SEQ ID NO: 2776 - DNA, 114 bp, Homo sapiens
  misc_feature (1)...(114): n = A,T,C or G
aggaggaaaaaggaaggcnanaaggttaaggaacgggaaaangaagtngtaggattgcaaaaaggnaaaagagcnttggtcgagagcggtaaaccaagtaaaagccaagaaagg

SEQ ID NO: 2777 - DNA, 114 bp, Homo sapiens
  misc_feature (1)...(114): n = A,T,C or G
ttggacgcgtgttcccagggatgaaaggcagccgagatctccnanagctgagacattgcccaacagnnaacangtcacgcctactgtatgaagagaagctggcctccacgtgcg

SEQ ID NO: 2778 - DNA, 114 bp, Homo sapiens
  misc_feature (1)...(114): n = A,T,C or G
agtatacgctcagaagctnactngngtctaacctgngnacttggaaccnacattcaacctggggtgaagcctcacaactggnggnctgagctcctgttactgccccgctcactg

SEQ ID NO: 2779 - DNA, 114 bp, Homo sapiens
  misc_feature (1)...(114): n = A,T,C or G
actatggctggctganacccatgntgtaatgagcatctgacgncctcttctggtcttcantacacacatgnaagaaactgctgnagacntattgaataaataaatctttcgttc

SEQ ID NO: 2780 - DNA, 114 bp, Homo sapiens
  misc_feature (1)...(114): n = A,T,C or G
atggcagggcctatgctgnantgatnatctactccctggccatntgactncattgatgatnggcagntgagatgctggagttcgacntactctgtntncagcttctagacagct

SEQ ID NO: 2781 - DNA, 114 bp, Homo sapiens
  misc_feature (1)...(114): n = A,T,C or G
aaagtatgcccaaccttaagtntgtgaatgtgctgcnntttncaaattattaaatcanatggcggcattacccgctcatcaggatgtccaaataaatctgtatttcacaatgaa

SEQ ID NO: 2782 - DNA, 114 bp, Homo sapiens
  misc_feature (1)...(114): n = A,T,C or G
gacttcttggctcttcttcagnacncaagntccctaaggcaccaagacaggctcctgcaatggtaaacataangnacaactgtgaggaacaaatacacatgtattgcttgtaag

SEQ ID NO: 2783 - DNA, 113 bp, Homo sapiens
  misc_feature (1)...(113): n = A,T,C or G
agctcggtacccggggatcgaanttcctagtcggangntgctattctctacaaagtatnggaacngntcnacctgcaggcatncaagctggggggnncgacgtccacaaggag

SEQ ID NO: 2784 - DNA, 113 bp, Homo sapiens
  misc_feature (1)...(113): n = A,T,C or G
cattcaaactttgtttttnactggaccctggnaagtaangaccacaacnagaatgtagcgtgtgnctgggaagtacaccacagngtctggtaactttctagggacgtcggcct

SEQ ID NO: 2785 - DNA, 113 bp, Homo sapiens
  misc_feature (1)...(113): n = A,T,C or G
tggtaatgtgggaatttggggcaacntgnaatgcngtatttcctggctgtnaaccactctacatgatttngctncataataaactattctnctatctcttttaaaaaaaaaaa

SEQ ID NO: 2786 - DNA, 113 bp, Homo sapiens
  misc_feature (1)...(113): n = A,T,C or G
accctgctgcaggaacatgtnctaacagtaacactactcaggcaaactctggcaataatgcaaagtaatcagcaanaaaaactggtggaaagtaatctgtaaacaaaaataaa

SEQ ID NO: 2787 - DNA, 112 bp, Homo sapiens
  misc_feature (1)...(112): n = A,T,C or G
ctgaggtgggtttggggctgaggtantagcctgggcancggcctaattacttgcttgtggaactctcaaaggcncggacagggaagcatggctggntccatataaaaaaaaa

SEQ ID NO: 2788 - DNA, 112 bp, Homo sapiens
  misc_feature (1)...(112): n = A,T,C or G
aaaggaaaagacataattctncgctcatctcctgnttncctcactctncanggnctggcangctcctataagntcatctaccagccttagttttnaaagcctttatgggtga

SEQ ID NO: 2789 - DNA, 112 bp, Homo sapiens
gcccctgctggggagagctctttatggttcacaccagctcacccattgctttctagtaagcacagatctgggaataccacaaataaagagactggggcttcaaaaaaaaaaa

SEQ ID NO: 2790 - DNA, 112 bp, Homo sapiens
  misc_feature (1)...(112): n = A,T,C or G
taatagtgcccccactgnccagccngcttcctgcntagctacgaacctcaagcaaccacattatntatacacacacntnnaanggnggntccctgtgcccagaacaatactg

SEQ ID NO: 2791 - DNA, 112 bp, Homo sapiens
  misc_feature (1)...(112): n = A,T,C or G
tatgccaggggctccagcaaactgcaactncntggctagcanactagcttggacgatgaccnngaanaataagatacatgtcncccataancaagncatacacaatggtact

SEQ ID NO: 2792 - DNA, 112 bp, Homo sapiens
  misc_feature (1)...(112): n = A,T,C or G
ttgtacaagaaccctntctggtggngcanctccatactggttgtcantgatacctgggaagaagaaagcngggggtaccagcancaangccagcgctgaaccaggaagcaac

SEQ ID NO: 2793 - DNA, 112 bp, Homo sapiens
  misc_feature (1)...(112): n = A,T,C or G
gatgtgctcaggggtngagctctctgctcatnngtatctncacacgacnnactgtctggtnacctnaagnnagatcacacacntgcaccttactactggaccctagcattat

SEQ ID NO: 2794 - DNA, 111 bp, Homo sapiens
  misc_feature (1)...(111): n = A,T,C or G
tgagcttaaaatgacgagatgtgtgatctnatggaataaatggcgtccagcagtcacagcatgctatagtctggtatcagaagaagattggagcctatgataaaaaaaaaa

SEQ ID NO: 2795 - DNA, 111 bp, Homo sapiens
agggagagagggaggagaaagaaggaggctcactcatgaggaggagatgggtcatgagcatgtggccagaagtggaccctgaagacaggctgttggaaagaaacagccagg

SEQ ID NO: 2796 - DNA, 111 bp, Homo sapiens
  misc_feature (1)...(111): n = A,T,C or G
acctgaggagggtttgggntgnggtagagcctgggcccaggcctaattacttgnttgnggaactctcaaaggctcggacnggangnatggctggctccatataaaaaaaaa

SEQ ID NO: 2797 - DNA, 111 bp, Homo sapiens
  misc_feature (1)...(111): n = A,T,C or G
acacaccttaccactttgctgnnagtannagtcctgcagtnctgcctctctgcncacagccaacccctgcaatttgtaattagaatgtaatgagaccagcgaactgcaaca

SEQ ID NO: 2798 - DNA, 111 bp, Homo sapiens
  misc_feature (1)...(111): n = A,T,C or G
ctgccactgggaaggaatgtcatgtaancaccntttaccattngaaaacantcantgtaagactgnaacaacagttggaagccagcnagnnaatatggccagtcgtatgtt

SEQ ID NO: 2799 - DNA, 111 bp, Homo sapiens
  misc_feature (1)...(111): n = A,T,C or G
ctgaaacaagaacaatttgctnttggaancatgcccgaccgntcatnaagttgcctgtacaaangggtttttagggnagaagaagctngccgattacgcggaatgagcatg

SEQ ID NO: 2800 - DNA, 111 bp, Homo sapiens
  misc_feature (1)...(111): n = A,T,C or G
taacaggcatgcattggaggtaatggaagtacctactggaaacacgcggggtaagctagtatncttgcaggnaagccaaggatggaggagagtctttttaaaataatccaa

SEQ ID NO: 2801 - DNA, 110 bp, Homo sapiens
  misc_feature (1)...(110): n = A,T,C or G
acctgaggtgggtttgggctgaggtagtagcctgggcngagcctaattacttgnttgtggaactctcaagggntggacnggangcatggctggctccatataaaaaaaaa

SEQ ID NO: 2802 - DNA, 110 bp, Homo sapiens
  misc_feature (1)...(110): n = A,T,C or G
tggtgaagaaggaacctgggttccattcccagnacccactgtagcgtactgacaattgacctgttccangcaggatntggacttcctcttnaggcacagacatacctgca

SEQ ID NO: 2803 - DNA, 110 bp, Homo sapiens
  misc_feature (1)...(110): n = A,T,C or G
actccactgggaaggaatgcatgnaancaccntttccatangnaaacaccactgcaaggactgcncaacgnngaagcaggggaaatatggnagtgtatgttcacagctga

SEQ ID NO: 2804 - DNA, 109 bp, Homo sapiens
  misc_feature (1)...(109): n = A,T,C or G
ggagagaaccagcctgccccaggttgncctctgacctccatgcaagcnctnnggcatgtgcctgcctctacttgaatacatgtgtgtgaataaataaatgtatttaaga

SEQ ID NO: 2805 - DNA, 109 bp, Homo sapiens
  misc_feature (1)...(109): n = A,T,C or G
acctgaggcatggctctctgtanncctggcaacnttacccntaagaaacctgattntnagacantgangaatccaacacnggggcctcagaatatgcagcttgggccgt

SEQ ID NO: 2806 - DNA, 109 bp, Homo sapiens
  misc_feature (1)...(109): n = A,T,C or G
gtgcccacttacctgtcacccaangtaggttgtagtatactganggtagccacagggcagtgcccnatcccaatnngntgagggccccccntacctgctgctacattca

SEQ ID NO: 2807 - DNA, 109 bp, Homo sapiens
  misc_feature (1)...(109): n = A,T,C or G
tgtcactttccctgcanatatccgcttaaaaaaatctggttgatggctttggtctgagcgttcannacatctcttgtgcaactaagnaaagcacctcattttccattta

SEQ ID NO: 2808 - DNA, 109 bp, Homo sapiens
  misc_feature (1)...(109): n = A,T,C or G
ggagaactcctcttctccggggctccctgntcgaatcccaccccattttcttttccccccntntctttgnatganacttgnnacacagaacttctctgggtagaggctg

SEQ ID NO: 2809 - DNA, 109 bp, Homo sapiens
  misc_feature (1)...(109): n = A,T,C or G
atgcagtgggctttgggnctgnngtagaaacctgggacagnagaccatcaattacttgcttgtggaaactctcaaggntcggnacaggaaagcatggctggttccatat

SEQ ID NO: 2810 - DNA, 108 bp, Homo sapiens
  misc_feature (1)...(108): n = A,T,C or G
acctgaggctggcagnacacaccccaaatnctgaaagnatatgagtcatgtttctggtaggcattaaatgattacaagcaccatgtttatgtctgggaaagaaataaa

SEQ ID NO: 2811 - DNA, 108 bp, Homo sapiens
  misc_feature (1)...(108): n = A,T,C or G
acgatacgggacgagnagtacaacaccctncatncatgtactactagcaggtggcggccttgattcnttcactgtatcccttgnnatcgcacagccattgtttgttgg

SEQ ID NO: 2812 - DNA, 108 bp, Homo sapiens
  misc_feature (1)...(108): n = A,T,C or G
cccctggccctggccaagcttcctacctggggctnaaagcgcgnagnnctgntttgtgtnggtttttaaaatancccannttncaaaactccttctaatgagaaccta

SEQ ID NO: 2813 - DNA, 108 bp, Homo sapiens
  misc_feature (1)...(108): n = A,T,C or G
ataacgtatacaccaacagtaggnatcctctcagggtgggccacagcactcttgagcatcctaagggtagtaagtatcccggggaaggtaaagaaaaaacggtatgag

SEQ ID NO: 2814 - DNA, 108 bp, Homo sapiens
  misc_feature (1)...(108): n = A,T,C or G
gccatgattcacttgcttgtggnaactctcaaagtccaganaaaaaagcatgnctggttgccttcngaaaaannnctantaaaccctagccttcgggcctttaagtag

SEQ ID NO: 2815 - DNA, 108 bp, Homo sapiens
  misc_feature (1)...(108): n = A,T,C or G
agtggggtcttttcaattctagtcngctgcctggtcactggggaacaatgctgccccatcttccacacctgggtattaaagtgaccacacaacattgtccttataaaa

SEQ ID NO: 2816 - DNA, 107 bp, Homo sapiens
  misc_feature (1)...(107): n = A,T,C or G
aaccaccctttaccttnnaaaacaccactgaagactgnacaacagttgaagcagcgagnnatatggnagtgtatgttnncagctgaatagattaatacctaaatgtt

SEQ ID NO: 2817 - DNA, 107 bp, Homo sapiens
  misc_feature (1)...(107): n = A,T,C or G
ggctggcagtcttacctgctcattcgttctgttcacgccnactgtctggnaanctgaangcagccacacangnagcacctttgctactgggaccagcatattattcg

SEQ ID NO: 2818 - DNA, 106 bp, Homo sapiens
  misc_feature (1)...(106): n = A,T,C or G
gagttcttttgacgggtatccgtcttggcacttcagggcatttgaatccacgntngnntcnttantnaaactggaaaggcctanttcaatagcctaagatgagcgc

SEQ ID NO: 2819 - DNA, 106 bp, Homo sapiens
  misc_feature (1)...(106): n = A,T,C or G
acactcctactggggaaatacaacccacctactnggagcacaggaanaagnccaggaaaacctggcccagcccaggcctgnctgcactccctgcttggccatgcgg

SEQ ID NO: 2820 - DNA, 106 bp, Homo sapiens
gcagctgcctcttgttccctgccgttgtgacttcccatcatggacggtactgcaccctggtaactgtaagccagtaataaacccttccttcctggaaaaaaaaaaa

SEQ ID NO: 2821 - DNA, 106 bp, Homo sapiens
  misc_feature (1)...(106): n = A,T,C or G
ctggaaacaggcagtaacttgcattcaggaccagcctggggcaatatggcctanttaanntatgaggatgcntgcatnagntaatgaccaggcataatcttgagcc

SEQ ID NO: 2822 - DNA, 106 bp, Homo sapiens
  misc_feature (1)...(106): n = A,T,C or G
aaattgtacccacagnggtntgangacaagagcgggaaagcagcgctactccttaccagtacacagggggncaacaagggggtacgtnttttcccctaaaaagtaa

SEQ ID NO: 2823 - DNA, 105 bp, Homo sapiens
  misc_feature (1)...(105): n = A,T,C or G
gcattagcagcattcccagactgtgaagtctgagacaaggacgnccnactcctgccaatccccaagaggnacnctccagaagtctgaggcacatacaaactggaa

SEQ ID NO: 2824 - DNA, 105 bp, Homo sapiens
  misc_feature (1)...(105): n = A,T,C or G
ctgaagattgaatttgatccccaggacgcaacctgctggaaggagagaaccaacgtncagtnattgtcctttgatccccatatacatgcacaaaataaaatgtta

SEQ ID NO: 2825 - DNA, 105 bp, Homo sapiens
  misc_feature (1)...(105): n = A,T,C or G
atgtgaaattttaagcaagaaantacaaactttgttcttcactggnactctnnncagatgnacctcancaagtaatgagtgtgctgtcttgtaatatacaccaca

SEQ ID NO: 2826 - DNA, 105 bp, Homo sapiens
aaggtatcaggagttaaaggattaacgcttctgtgcccacgtggtagttggaaggcagcctgtattatatatgagacgctgtctttaaaactaaacaaaataaaa

SEQ ID NO: 2827 - DNA, 105 bp, Homo sapiens
gcagcacaaactgtggcactcccaggtgaaccctgcgatcgctgggaataggcctcgggtcgcagcacacgaactgcagtgatgtggtaagcaaacaaaacaaaa

SEQ ID NO: 2828 - DNA, 105 bp, Homo sapiens
  misc_feature (1)...(105): n = A,T,C or G
gagggacatagtaacatgcaatgncccgttcctatatgtctggaatccacgactncctgggaaggtgagtggntgggctcacccctgcctgccaccgagtaatat

SEQ ID NO: 2829 - DNA, 105 bp, Homo sapiens
  misc_feature (1)...(105): n = A,T,C or G
cactgaaatactggaacaaagttggaagcncgggnanatatggcantgnatgttnacagctgaatangatnnatacctaaatgttaanatgcaactaaaaaataa

SEQ ID NO: 2830 - DNA, 105 bp, Homo sapiens
  misc_feature (1)...(105): n = A,T,C or G
gtacctgaaaatcaangagnactgactgtttctgcctcatggagtactccaccatcctggctaggagggaacaggcanttaatcacttttatttaaaaaaaaaaa

SEQ ID NO: 2831 - DNA, 105 bp, Homo sapiens
ggcccttcttgcctggtcgctgccatggggcacctggaagctacatgggcaggacacaggacaggactcacacattcaataaaaatgtttttaaaataataaaaa

SEQ ID NO: 2832 - DNA, 104 bp, Homo sapiens
taacagcatgtattggaggtattggagcacctactgggaacacgcggagcaagctagtatcttgcaggtaagccaagatgaggagagtctttttaaaataatcc

SEQ ID NO: 2833 - DNA, 104 bp, Homo sapiens
  misc_feature (1)...(104): n = A,T,C or G
acctgaggctgggccctntgtctcttgtntgaccttgacgcccaacgcccgtaaattgntngnnncccagntntccgggtcttacagggaagcatggtgtggta

SEQ ID NO: 2834 - DNA, 104 bp, Homo sapiens
  misc_feature (1)...(104): n = A,T,C or G
caggcacatggtaaatctnagnatgatgagtatgccctcggcccccatacaccagcgctgactgccccnagcccatggtggtgaccccaggggccggggctgtg

SEQ ID NO: 2835 - DNA, 104 bp, Homo sapiens
  misc_feature (1)...(104): n = A,T,C or G
gctgggagcttgggtcctctnaaagggtagccagngctcttaactcctgaaccatgactcctgncccaaatctggcttcttaaaacttatttctgagaactgaa

SEQ ID NO: 2836 - DNA, 104 bp, Homo sapiens
  misc_feature (1)...(104): n = A,T,C or G
tgtacagctaccgctcccatcntaganngtcaatactgactaggcaggaccnntataagtaagnagnangtacacagcatttttnttttttcttagaagcacac

SEQ ID NO: 2837 - DNA, 104 bp, Homo sapiens
  misc_feature (1)...(104): n = A,T,C or G
gggaggctctgccttccgcaggcccagagcaaaggcgaccagnagaccatgggactagaatctctgaaactctaagctaaagtaaatcttcccactaattttaa

SEQ ID NO: 2838 - DNA, 103 bp, Homo sapiens
  misc_feature (1)...(103): n = A,T,C or G
ctaaaacattttgaggaaatttnnggtatacagcagaaggcattagcaggattcacagctctgcatggaaggcaaanatcaataaacagtctgaagaaagttt

SEQ ID NO: 2839 - DNA, 103 bp, Homo sapiens
  misc_feature (1)...(103): n = A,T,C or G
aggagaactcgaggatggaacgcgnnaccngcaacctggtactcctgcatcagctctgagacctgagcaggtcnagtcagcagtgaatgccccagttgccatt

SEQ ID NO: 2840 - DNA, 103 bp, Homo sapiens
  misc_feature (1)...(103): n = A,T,C or G
gaggaggctgatctgcccattgcctctcaccangcccacgtgnctggaacctgnggagcccaccacactgtgncaccttnctactgnaccaaagattattcgg

SEQ ID NO: 2841 - DNA, 103 bp, Homo sapiens
  misc_feature (1)...(103): n = A,T,C or G
gcggtaggtctgaaggatgagaacaggctncccnnactgtgttctctgtnctcacttangtgtgccnaggcgcacctgtagctccacacatatatacataaac

SEQ ID NO: 2842 - DNA, 103 bp, Homo sapiens
  misc_feature (1)...(103): n = A,T,C or G
catggttgtactgcacaactcattctgtgaacaagnanccaatacattnttctagtgngtgtctgacggacagctgcngngtactcatataaataaaaataaa

SEQ ID NO: 2843 - DNA, 103 bp, Homo sapiens
  misc_feature (1)...(103): n = A,T,C or G
ctgttggcagcttctcnnctgcattacganngctgctcacgctgcactggtggtaaccnagaggagncncactctgtgcncctnctctactggaccagcacat

SEQ ID NO: 2844 - DNA, 103 bp, Homo sapiens
  misc_feature (1)...(103): n = A,T,C or G
ggtatgctggcaaactgaaatntggncctctgcaagtagcagcaagnantcttaaccactgagcatcttcccagcctacaaatgttngatgttactaagcaaa

SEQ ID NO: 2845 - DNA, 102 bp, Homo sapiens
  misc_feature (1)...(102): n = A,T,C or G
gattggagaaggacagantgtntgtgaacctggacgttaagcacttntatgcgnaggaantcatagggnaggtnctgtggnacgagattgaggtctacgaga

SEQ ID NO: 2846 - DNA, 102 bp, Homo sapiens
  misc_feature (1)...(102): n = A,T,C or G
gagcatacttgtgcactagaagaggccaacnngtgacnggaggncctatnctgagtgggctgacactaggttataccnnnagcaagacccacgcttgccttc

SEQ ID NO: 2847 - DNA, 102 bp, Homo sapiens
  misc_feature (1)...(102): n = A,T,C or G
ggcctgcagttttgcaagaagattctttctaacccgagtttgctgaacatgggaggnactgtcccatctgntgcactgntgctttgggggtaaaaaaaaaaa

SEQ ID NO: 2848 - DNA, 101 bp, Homo sapiens
  misc_feature (1)...(101): n = A,T,C or G
gtcacctttgctgagagaagctgtnngaaatcacttttnggggagtncttgatcttcacaaaattaagacttctattttcggatccttacttgaaaaaaaa

SEQ ID NO: 2849 - DNA, 101 bp, Homo sapiens
  misc_feature (1)...(101): n = A,T,C or G
acctgaggaaccctttcttgtntgtagtggcggcagtngaangnnattaccccttgntctatgctanagcaagctggcagatggcgtcttccgtgggcaac

SEQ ID NO: 2850 - DNA, 101 bp, Homo sapiens
  misc_feature (1)...(101): n = A,T,C or G
ggaaaaagcctcacaactggngggctganctcctgttactgccccgctcactgccccctgttnnatggcaaataaacttgntttctttctaaaaaaaaaaa

SEQ ID NO: 2851 - DNA, 101 bp, Homo sapiens
  misc_feature (1)...(101): n = A,T,C or G
gcccaactcttacctanccaggggatncccgaatttcatgttaggaccgggnnacgcggnattnnaacaactaccactgggaaanaatgtcatgcaaggca

SEQ ID NO: 2852 - DNA, 101 bp, Homo sapiens
  misc_feature (1)...(101): n = A,T,C or G
cattgtgtaggcccgggngccggtntgcaacacctncactggcnagnaatgtcatgagancagcngaancatacanaaacaccactgaaagtactggacaa

SEQ ID NO: 2853 - DNA, 101 bp, Homo sapiens
  misc_feature (1)...(101): n = A,T,C or G
aacccgcagtcagaaacgcacccttgnaacctgacctaacggnaggatgatgtgggaggaacaagnaaaatgaaaatgggagaaagggtcatatctgatac

SEQ ID NO: 2854 - DNA, 101 bp, Homo sapiens
  misc_feature (1)...(101): n = A,T,C or G
agggtttgggtctgcagttagtaccctggggcagnngaccatcaattacttgnttgnggnaactctgcaangctcgggacaggnaaccatggctggtgtcc

SEQ ID NO: 2855 - DNA, 855 bp, Homo sapiens
  misc_feature (1)...(855): n = A,T,C or G
aaagggaaaacactcgtgggtnccagntagtgcccacataaatatntcaccgtgtaactgtnggtcggtggaganagncngatannnacataacanatanatgnncagctccatgatanctctntctatntcgcactctntaanacgctannnnaaaaatcgctatcgcgctatggagaccccttgtctttcatcatggggtnaaagggcaccnnaggnaattgagttnacacatttgtgacgtatatccnttnganttcccttgtttaaacagggatgcacactcncanacaataaaaacggcatnctttcccagtnggatctatatcacaganatattatancccttanananccngcctttntaaananantntgacntnaaacaaacaccttttnataccatgtgcgagatataggtaaaacatangcgtgcgtgatttggggaagaggnacgcgggtattngattaatgngncctttttggggccaattnanccacatgcccnaangnnaagttagggccancanctaaaaccnctcaaannccaaaaggnccgcctttantttattcgggaaaccaccggcccnaccaatnnantttatgcgcaagaaggaagcccccctcnttggggacctttttggccttagagacccccctgtcattaaggccccctnncagacccaaaaaaatgnngggcgccatatagtacnggggatgggatgtccttncactaggcatttttgcaangntttggaacgnaaaggaaccnccccttaggtttcgttccaacacataaaaccaataaaggggctnggaagaacgncaaggatttcngtaaggatcggaagattt

SEQ ID NO: 2856 - DNA, 685 bp, Homo sapiens
  misc_feature (1)...(685): n = A,T,C or G
gaggccagtcttatgnctctacctgtgcctagtcttacgggnaacctctactcatgattctgtttgcaggcgcttcgcacttccttntgcggactctngccaatggccccagccttgggaatggcccatacgcacactcgccaggnacaattcacggacggggagcacaccccaagggcttcacccacccggggaacacaagcagaagattgcttgctgngntccctgcccttcttgggggacccccactnanctncaggacctgngctctttctttgttgcttcaggtaactggactgngggactgcacactccccacacgcttnccagggatgctcttgtgtnccangggtgggtnctcacantaactcactgggggcctctgttgtgtggcccctgttttcacganagcacctgggactgattcccaaactgggattttggtcctcaatctttaggtgaaggnatgcacncaggaaaaggatcccccanaaatggtgacttctgggtttgaagtctggttgactggttccctnttgacactnccctctgggccagcctacattgccagaatanacttngagtccttgggagcccagtntttggaaaagggacatttaanaaaccccaaaagngaagcccagggcgcattgccttatnaaaaggggcactttggggagggcaa

SEQ ID NO: 2857 - DNA, 684 bp, Homo sapiens
  misc_feature (1)...(684): n = A,T,C or G
cgagggggccccttgagatatctcgtctctcggtagtagtgtttnactcgctatcctnngcacgcgnaaaanccagnctctatagntntcnctnggagnagcgcagcttcacccaaagctttggtctttntcanatgaacatnttctagcacaganatcatcngtnctatnggatagatatgctcaccaacattgcattgncctgaggagtaattcngcaatngagaggaatnctctcgtgtttaaaatagnctcanctngccatagnctnatntagngngttcgngcacacaagcaagaggaaagactncccaccacaggttngttaccagccggggtaacanttaattgcgcgggggtaaacacgccaagnaaggttcctaacnttnctttttncccctngaccggcnaggagcgggnggaattnggttatcggcgcagcggtgncaacggtggccntttcgagggggataaagccaaggcaagctcgcnaccagnggcggaaaatcgaattccaaanccaanagccgccttgggtnggggcccccttctatttttgacncncattggggngtcctngggcgattttggggnaccccggaggangnaacntncntgggtnnaatanctttttttcggtnttttatnaaaatttnaaaatnccttccccattgggggagattt

SEQ ID NO: 2858 - DNA, 595 bp, Homo sapiens
  misc_feature (1)...(595): n = A,T,C or G
ccaggcaccagcaatnntncaaccagtggaaccacttaatgtccttagnaacaggactttggaggccaacttcaccaaactggggaggaccatttaaatacattgttggacctgtgtggattcatgcagnaagnaacggtgctgggttacacttccgccaaggttcctgcttctggggacagctccacagacggnaagctgcacagtnccgatgggnaggaacaaggaccatgtgactgcatcgtcagtacctttcggnactgtaccatctgaccaccttgcncagcctcagcctcgtggtcccagcatttncagtccatnttaaccacncagctatgttgggcaaaaccccttcctcctaagttgntctgtggcactcttcaaaaaaccaaatgactccccagtcacagggaaccacatgacttcagcccgattanncagctcacctgtcatctgagccaggcagtaccactttgntcttaactgttcttctccaaggggctaaaaaacctcaagtcctgntggggtggaaacagctctactttctggaaaatgatctccagaatacactaacttttncatacttttatttctt

SEQ ID NO: 2859 - DNA, 592 bp, Homo sapiens
  misc_feature (1)...(592): n = A,T,C or G
actgagggttttgcccacccatcaaaggctcttctgatggagaaggnagctgtgactcagagatggaccactcanatgatggagctgcngaagcnnacngtgnggacantgttgnatcctgtgaggaagacaatgaacgacgccncanagtcnantgcctgggaccaattnaggcctgggcagatgccatggcanaaatncttaacaaaangactcctaanagcaaagccaccatcctcaccanaancaangagctggagaagganaaggagaagctaaagcagganaggctggagaaaaggaagcagcttgatnanaancgngantgggaaatgctgtgcagagtgaagccanatgttgtcaaagacaaagaggcagagaggaacccttcagaggattgcnacaaggggtgtggtgcanctcttcantgctgntcagaaacaccantaggaatgttggcgaanaggttaaggaagcaggaggctccgtccgcaagcgagccaagctgntgtcaactgtttncganaaggatttcatcagtgttcttcgaggaatggatggtacangtaggaacagtcctgctgggtgctgg

SEQ ID NO: 2860 - DNA, 589 bp, Homo sapiens
  misc_feature (1)...(589): n = A,T,C or G
atttgcagggctacatggnctcctggtggctgtgggctcttcgtgccgctttcttcagggagcagggaacaccggagctgaggccaccacattgcacgcagctccccagggtgcagctatggctgtcagcaccttccgaaagctagatgggatatgttggcaggtacgccaactctttgagaacacaggggtccctggccgcttcttgttccaagtctcacgggcccgtggaccagtgcatatggtggttgctgagactgactatcagagctttgccatcctgtacctggaacagggaaggaagctgtctgtgaaactatacgtccgctcactgccagtgaatgactctgtcctggatgtgtttgagcggcgagtcagggaagccaacctgacagaagatcagattcttttctttcccaagtatggtttctgcgagactgcggaccaattacacatcctgaacgaggtgccgcgataaggccatctagtggagaagctgtggacagtgggctaccctcanagagttctgagcatcctgaatgcactcttggagtctctcctttctgtccccagaagcaccccttcatat

SEQ ID NO: 2861 - DNA, 583 bp, Homo sapiens
  misc_feature (1)...(583): n = A,T,C or G
gaactgagattctaccatgcattttacatatacagcacagctcatatcatctcgacactgcatctccataggactgctggaaagtgctgctgtgcatcgtggagcggcttagggtctcaggaaagcagtagggagctgtaactctgaataacccagagctnantggaaaagaggcttatggaggagggcntaaagataaaagaggcagattagacaggaagaaccacancttgggcttgctgggcagcaggtggcagacatgattgaagacagacagtcctaggctttagggccatgtaaccaaaacacttgagagaaaactacatacnagaatgtacttgctgtcagccatgtgacaatgcccatgtcttaagatgtgtgggttcagaaagaagtgatgtgcttgacacaggatccagccataaccccatgtgtcctgancatcaagactgtgaggccaagttgagcttagcttctaacaccagatgcactagtgactggagcaggccagtcataaaacagaccaggaaaggaaacatatacatcaagttngatgagcaccanccaattagaaagggaggcg

SEQ ID NO: 2862 - DNA, 583 bp, Homo sapiens
  misc_feature (1)...(583): n = A,T,C or G
tgagagcctggagtctgtggcaagcaaggaattgattaggggaatgcaaggttcctacaaacaggaggcaagaaagcaggacatggagcaagaaggacgacatgccgtgactcggattcgaaccgaggttgctgcggccacaacgcagagtactaaccactatacgatcacggcgagccaccgcgcccggcgacgtaagacgtgacctggtgcccgccgcgtcgggagccccgccgagcgcacgcgcctgggcgtcagctggaccacccacggtgaggttgaggtccgtgcgtgggtcgtggccattcttgcaggcgcaggaggagccccttagctattttccccaagcccgcgatagacctccatcgccgtcgtctccgcgggggccggggcacctcgggagggggcgagctgctatggggtcaagccagccgntccacgggcgttcctanaagcaagtccaggggtgtaaagttcctancttttctacatcaaaagaacgcaanctnanggtgnaacaaggntcctatgatanccgtttacctgtgttactaaaatctcnagacttgtaaaaaatataaaa

SEQ ID NO: 2863 - DNA, 582 bp, Homo sapiens
  misc_feature (1)...(582): n = A,T,C or G
tattgctgacagcatatcttggccagtancaagaanacncaacttaatactggagtgggtggtacangcnggtatcctcatcccnaggacattgtacctgngatccaatcatgatgnggaagcatnntatggaannacaaatatgccttganagangnnntacaacgaagccagaagtgggntgtgcacananagaaggntcaaancnaaatgcgcnattctggctggctcccagacnctctncctgttangtgccttaatgacngaccanaangcngntctcacccnaatggcnttctntgcctcttacanagtgcccggtgactatctcatntatncaatncagtgacctcnnanaangaagctangnntgagaanggtcaagtggcattcccagaatcaaggaaaagttattaagaagtggaacccatccaggccactgtccccaaataagcattttgagaacaggtagcatgggccaggccttggagcaaaagaatatgtcctgcacaacggtcaccaggactggcatgtgacttgtccttcaagacacaggtttcaccagtgtgctggcgtgctaaa

SEQ ID NO: 2864 - DNA, 581 bp, Homo sapiens
  misc_feature (1)...(581): n = A,T,C or G
gaccacggtgtgggcactgcgcncaatttgtagcngtaaagaaggnngctgttgggaaaagccattcgnatcagtgctttgctcgaatggnaacagcccctgcagnacaggggtccaggtggccatggacttcctaccgccgcatccttcgggtacatgcctggtgaggagcngaaggaaaccaaaggttttgncanaccctntaaagnagcttgccngaaaaatggggnctntgcctccngaactctggccngaattgacctnnatnaagccctgtctcnacctatgntatgaccnnatgtgancctgnctttaggaggcattnttagagattntnaagctccantgcaccctgctntgntncngnacatanatgctttnangcattccctgntggagagganggcanaanttgcatgttagaagtngctgganacatgatggnatacaagagaagcttcctgatccagggagataagcgcccatcctgggaggcctgggagagccacatcctccgggaggaaaaggaaggatctatgagtctgtcaccagctccatccaaaacgacctgaagccctgct

SEQ ID NO: 2865 - DNA, 580 bp, Homo sapiens
  misc_feature (1)...(580): n = A,T,C or G
actcacaaccatcatcaggnatcctgtctgcacacagtcacctgctttaccatcccaacaggtcaagtggtccatgcaagccaggcctcctgacccactgcatttgtgcagagaacccttgactcgagcccgccagtcctcgcctgccttgagaatgagatcaagggcagcatctggcccagaggagagcccctcaaaaaagacagaccaggtcccacagcccaccctagtggtggtactggaagacattgccagtggcagacaaccagcagagggttttgatgaanatcagcccaacctcattgtcccancacaaaacaccttcnnaagnctgagngnagccggagaagcantgncacaaaaggggtctggacttgnaagcacgcccaactcttactttgtcncttcacccttanagctgagcctgtgacanaagctggtcagccaatgcctacaccnagngncctacaaccccnantcnaactgtatactctacctgcnnatactacatngaggacanaaccagatcctgctctggagaccccggngattnnaacatcgttaagccttttacgacccc

SEQ ID NO: 2866 - DNA, 578 bp, Homo sapiens
  misc_feature (1)...(578): n = A,T,C or G
cctgtttgcacggcaacagcctgactncctgcattttccgaccggaattcttgccagctgtatacccttaaccgggtttgaaaaaatggggatgacctttctgcggggncagcacacacatggcagcangcacagctgccgggcagacacgtganggaatgttcaaacacacacatgctncaaaagagatgttcctgggaacaatgagatgcttgtttcanctgaaattaactgagagaggaaagagggtgcccagcacccgctccggngtgtgttgaaagaagcgctggtgtggagctggngggcaggcaaacancctgctgtgtgaagccttgcatccgtcancaaatttattcattccctttggcccatgctgttccaagcacctcacttgangaagtaactggagatgtaaataatttgtgagcgctaaaaagaggtttatagtctgtngtccttcactgngtttatacancaaatgnctgacggtngtgggcaantnaatggncacttgctgntgnagttgtcatctggcngccattgnnacttaaaatcgacgancttataaactgcaaata

SEQ ID NO: 2867 - DNA, 576 bp, Homo sapiens
  misc_feature (1)...(576): n = A,T,C or G
gcactatgaacccatgttcaccgaacaaaccatatctgggttgctgatggctgaactacaacttcaggctgtgaanagacatctgaatgttgcatagcatgagtcggaattacatggggcatatctctagttccctttancagtcatctgctagttctgtctgagnttacatctttgctgacctcctangtgcagcgttttggaatgcacntgcagaacttgcctagaccacctggtgcccaccgaccccgacactctgcctttgtngggcccccatcccccatatgtttggtaaatgtagtgatttatggcttcttttgttttgtgactataaaaagttcaagtcacctccttcncagnggaacaggacattagggacagnccaaatncctgctnccagacacaggtactctcagntggcccangaaaagtggctttcattccctttggaccaacaactgtgatgtgggacctcagagatgatcatctgaggagtcatcaggattggaaccaggtgccagcaccagncgtctccatccgtgntgtatctcagagtagataatggatttcctgatc

SEQ ID NO: 2868 - DNA, 576 bp, Homo sapiens
gactgaggtccttgtgcagcgacgtcttcccctccgcctgcagccggatcgcagtctggatggctaagggcagagccggacggagtcagccctggtctagtcaccaccgcaaaggggccccaaaggtcactccggtgaacaggcccagttagacccaggccggcactcaccggccgtccactcctggcgctggcgggtgtctgaggcgctcatctcataggtgcggctggcagtcttcacacaaaacatgcagcgctttccttcgcggtccggaagcacctacaggatggcccaggccaagtgacttcgctgacataggagccacatctgccccagtagtaccccagctccagcttcctcctctttctcttggctgaccatcttctctgggaccgttcctaccctgccaggagtatgcatggtctggggtggatcgttagttacggggtgcgtgcgagccactttattcttggtatctctccacaaggtttagtacatagtacatgcttgaacatgtgcctggagcctcactcagcacctacaacttgctgatttccacctggtctcttaaatggc

SEQ ID NO: 2869 - DNA, 575 bp, Homo sapiens
  misc_feature (1)...(575): n = A,T,C or G
actgaggaacagtggctagagggtgcccttccccagcancatcgctcaggaactcattagaaatgggtgacagaatgcagccctgatggttcagatatctcatcctgctggcacatgggagagcgaaacagaagccctgcctgtcactaaaacacaccctggtnatgtggaaagtggcttgaaacatctcccaaagcaattgtagcctaaagatgattatgagagtgagcagggtgagcaaggcttgctttccttagtagactacagggagaactcggcagctgtccaattagctctgacaagaaggtggccaggagtttagccactgtgaacaaactgatggatctcccacttaatgcatagtgtgccttgggatagtagttaattaattaggatgatgtattagtcatcatggtaaacaagacattttaaaactaagcgtgtagtttgaactcagagtttaaattgcattggaagccacacagcacatcagccctctcacagtgtggtggtaaatgctgacaggtcctgtccagatgctcccagaacctcacttcctcccagcccattgtgag

SEQ ID NO: 2870 - DNA, 569 bp, Homo sapiens
  misc_feature (1)...(569): n = A,T,C or G
tgtttggagaggggacctacctcacaagtgacttgagcctggccctcatttatagtcctcatggccacgggtggcaacatagccttcttggcccgatcctgagctgcgtagctgngtgtgaggtcatcgatcatccagatgtcaagtgccaaatcaagaagaaggatnanaggganatanaccggagncctggcatgaatnaagcanatccaggccgggagaagatcnccgntaaaacctntgtagttaccagaanccannttcctgcagggngaagtancgngcgtggtgtattgccngaagcagcccaanagggcctggancnagctctgctggatgttcanccantggttagtnatcatgatgtcnatgtatntgctgctgatgctcatagtgagtgtcaccaacncctctgngatccaccacttgnggantngngagaagagangancnnaggngcttggagtggggccactcaccgtgtgccttatggaaacttgncctctacctactgtgtgtcacatccggncaggncgagtctggggaccatttgcaggggtgcacaggac

SEQ ID NO: 2871 - DNA, 568 bp, Homo sapiens
  misc_feature (1)...(568): n = A,T,C or G
gtatgcgtgccttcaaggnaaattctggnttcctaggngccagaactccctcttggcccggtagagaaagagaattccatctccagggctctggctgaccagcctcaactgacatttgtcagttacaggtgatggcgcttctcccatacattcccacgagnagagcanagactacagctttagactcggggcaaccaggggaagctggaggcctccacccaaagttgtaattcccaacggnttgcattcaacttgtcatacaagtaaaaccaaagcagctttgcaggaggaggagcacctggaggacgaaggagccgaaacagaaggaaagatgtggccctcaaggnggaggaacagatactgcaagtcaggaagcttctggcaggaaggaaacagaggggaactcgagcttgccacagcctgggggctnaggttaaggaagacntgagccccgagagcctctgnctcttntgtctcacaggactcagcgaccatgccagcagcctggcacaagcctgttaacatttctgnctactgttcttntgtttcaatacttatttttatttta

SEQ ID NO: 2872 - DNA, 555 bp, Homo sapiens
  misc_feature (1)...(555): n = A,T,C or G
cgagggaaaggactccggaccgnaccgnngngcggggctccagnctgcganncantcgtccatngaccggccngcnncngcccaataggtccaanaggtggngagcgacctgcagagcatncacaagaggggaggcgtgacantatacacctacagaaggagcagcangtgccccctggagcngacaagaangcatgaagatggggctggcatcanccactgacttccagattanaggctgttntgnanncaggacgtggtgcctcncctcagtgaagnncanattttatgttgtnntgnntacnctttanaganantcttaanactgaaaaagactcttctgtcctgntnnngaactctggatcctnttgcttccatcccacaatgctgaatgtgcanatgcagatgtgagccatncccnagngcaatgcttttgttctctgatagaaggcagatgctcaaggagagttaccctaacaactgcagctcccaatgctcccctacagcaaaactggctggaatggagaaaacccaagtttaaaagatgagttattt

SEQ ID NO: 2873 - DNA, 551 bp, Homo sapiens
  misc_feature (1)...(551): n = A,T,C or G
tgccttgatgataccggagcgaacctctgaacgctgtacntagcagncaatgcnntgtccgtccatnattnatanctaccantgnggctgatgnatagtanacgaggctcnnaagccatacactnangcactaatctaacacngcnatgggcacatcggacaagcancattgaccnnncnatcncncctcnancccncnacntnnngtgncnccannagnttactttnccgntgggggtnggatggganggnactggacattttgttttttctgacagccattcagtccctttacctgtatacgtattatctacaacctacctacatagtctagctatctcacatcatgatctcagngccttctaagataaattttatttctttctttcttttcatgtttgtttaggatagtctaagaaaaaaaatcctacaagtacaataatatacaccctgatctgttctgtcagcagttatttggntatttacattttcttttattaaactttaatcattataacttaaattttactgaacaagaaggtatattgaaa

SEQ ID NO: 2874 - DNA, 549 bp, Homo sapiens
  misc_feature (1)...(549): n = A,T,C or G
tggtaggggaacttgtgcnctnggntaagggctntnaattcnttaaggaagggccaaaagggtnggggtgnaaaaaagccccnccagtgggccagttggagggcccttccgganggcttcaccaacagtggcgggaacncttattaacacttcccagggccttggaaggggggccantaggggagggggggagacttttgtcnggagttnaggagaaacacccttatagaaagcaaggnttgttnggtgggagncccngggnactcttgggagaagaaagctgggtgagaccacaggggctttaagggagacatttaacaccccccatttccccactgtgcgnctcttnttcggggncaccaccatgttaaccagggagncaccctggnacctctcaaaactactggcgagcanctgtggagtgtgcacgtggctgagaaaacatgagggagngggncctctacctccaccctanacacctgccaagacctccaaaaggagatggnaccccccctgtgggaaaaaaactgcctgagcacattgtccaac

SEQ ID NO: 2875 - DNA, 547 bp, Homo sapiens
  misc_feature (1)...(547): n = A,T,C or G
ctcccctctccactactctantgntnntganacnctanacacaagggaacccaaggaaggaannggnanngagccctgggcgctggcatnatggagtnaacgttgcctcctggacanagatctaanatcgagacatnctgttntcaccanctgnccatgacacgangcatgatagngtcagcgtcatggcaggaccacactntgaccncaatggcttnagagncaccgtgcttccttcttnatnnatatctcnaaccnancnctgatgccctgtnttnngatggatnangacgcgtggcggtggangtcacataaagcnntntatntgctnntnttnccaatgnggccacaccaactaaatctcctttgtctgttttcactaatgtctatgtatttaatgtactgtggatgagtggcagagcctgtggtgttagccctgtcagagctcaggctttgaccagaattactctactcacaatcccagtattgccacaagtttaagactagcctgatgggctggagaaatggctcagaggttaagagcact

SEQ ID NO: 2876 - DNA, 539 bp, Homo sapiens
  misc_feature (1)...(539): n = A,T,C or G
taccttcctgcctaccctaccaacacattccgtcantagggaggattcttctgcatgcattctgcgtncacgnngnncaatattanaaaccatgatttttggcttaagtcaccctcaattctgtttctggtagacggnagcatataggaacctaaaatgctttgggcgaagcagcaacagccaagccctgactcatattttcacaaacatctactactttttacttttaactcaagaaacatggctacttagtagctgcatgagggacatggtcttggattctgccaccaacatactgacatctgagaccttttgactcatctaataaacttcttctccagggggcttacattcctgttacatgtgggtgactgagataatcantgctacagttagtttcctgctcanaagagaactgatgtcatttgaccccccacctacatgccctaaattgaaaacaaactacaaaaagnnttacttatctatgtcctcatgataccggaaccaacattaaaaacatcngtggctttaaaaaaaaa

SEQ ID NO: 2877 - DNA, 538 bp, Homo sapiens
  misc_feature (1)...(538): n = A,T,C or G
ttgtgggactggctaacgcggggaaaaccccattctgtatcagttcttaatgaatgaagtagttcatacttctccaaccataggaagcaatgttgaagaaatcgttgtgaagaacactcatttccttatgtgggatatcggtggtcaagaatctctgaggtcatcctggaacacctattactcaaacacagagttcatcattcttgttgtggatagcattgacagggaacgcctggctattacgaaagaagaattatacagaatgttggcccatgaggatttaaggaaagctgcagtccttatctttgcaaataaacaggatatgaaagggtgcatgacagcagcctgaaatctccaaatacctcaccctaagttcaatcaaggaccaccccgtggnacatccagtcgtgctgtgcgctcacagggagaaggggttgtgccaagggctagagtggntgacctccaggattggtgngagataattttttttgcttgaaaaaagacttctttnttttattcggngatatgaacatttttt

SEQ ID NO: 2878 - DNA, 537 bp, Homo sapiens
  misc_feature (1)...(537): n = A,T,C or G
ttactagttaaccaaagngggacttcttgngangccctttnagcannaccaaccaggctaggccaccaaaggttctttncncacnagnngggaaaggcaggactngcaattcacnccacanagtagcnaaggcnacgggggccttgggacactnaggacncccccttggcntnatnattattaggcaggatgnaggcgcacctttggatgctttcatagncagggtgcttgccnacaacnaactgggagctgggggctngtaccctagaagatactgtatagntctgcttgngggatgactgcggcccctcaaatgngnacagtgctatgtgctggncgctaggggttggggagaaagaatgngcctacttctctncctgcnaggggactgtgatgatgcaangnnggcggngcgtgggggnagttgaacattttgtgaatgtgnggggnctgtcccnctntntanttntgnagnaagcgggggattggatggnaaaggaacacnnacattaaggngggttatttgtggagtgaaag

SEQ ID NO: 2879 - DNA, 531 bp, Homo sapiens
  misc_feature (1)...(531): n = A,T,C or G
agtggggtctttacancaccagnancagctcctctgggcactggnacacctgnagcctgcaggnaggggtcgggctggcagtatacctggttcctggcactcttgaccttcccagtggcggtgataaggagacaggggcatgttgagcacatttgccacagaggctgcctcggcttacgaagagctgaaaaccaggacgagcagggagatcacttaacctcacccctgctgaccacttttccagaatgaattncnnaaagaatancgangaggncgangacgtntnggannaannngacctggcgcaaganagagctgaccccctaccggagggaaatgactttctggtacagaggaatgcaaccacgcaaacattctgcangagntcataaatctggatgtgctgagcacacaggagtcaccgtcttcacagaacatggaaagatttaacacattaagaggaaaataaccacacangaatgtgnattaataagtaggacgctaacatcaacaaaggcttttcctttgtat

SEQ ID NO: 2880 - DNA, 522 bp, Homo sapiens
  misc_feature (1)...(522): n = A,T,C or G
ggacaggacgagatagacgggacagacagatannncacatncgtctgngtngctgnctcctgcnnacattaacacatcngntacatgncntgtcaacgtgnngcatgngcctggcattnacttgggnccctggntcctgtcctctgaccctttaanagngnttngncacgncnaanggtgctacntaagntgncnanagcnacagaangggcacttntangtctcnnaaggttcacctttggctgtnctgttatgcaaaggcaggccccctngaaatctnaccggaaggctccagncctctcagacagaattccaccctcctcctaaatctagtcttcattcccagcatanaaagacacctgctttttctctttctgaaaaccagccacccaggctgcccccggcagccgcaagtcttttcctactgcacaataatgaaccatgcaagtgttanaaatataataagctcacccggcgaatatcaaaatgtatggaatcgnattttgcattaaacacacacta

SEQ ID NO: 2881 - DNA, 521 bp, Homo sapiens
  misc_feature (1)...(521): n = A,T,C or G
aaataaaactgatagatagcatggcncctttttggccagcattacactgtttcatggtgattcttgatcgccttggatctaaggtatggggtcaacttattgaccctattgaagcatttcaaaccatcattaacaacgagagctacaacagagagatccagaatatacggaacagcctccataaggaccaagttagaaccggagccacattttgatgatatggtgacgtgcagccagattgtttataactttaatcctgaaaagaccaaaaaggattctgggtggagatcagccatttgtccagattattgtccaaacatgtatgaagaaatggaaacattagccaatgtacttcagtcagatattggtcaagatatgcgtgttcataacagcacctttctgnggntcataccttttgttcagtcactcatggatcttnaggatttgggtgnggcttacatagnagaagntantcatcatctatactcagaagncanagatgtcctcaaccaagacagaag

SEQ ID NO: 2882 - DNA, 519 bp, Homo sapiens
  misc_feature (1)...(519): n = A,T,C or G
aaagaaccatgccggntctcctactactgggcctgattggggccctgacgctgctgtngatgctgacgctgctgncctttgctgnttattcaggactgcatgactggggtagacagtganccgctggatcacccccaatccgcatcataattgnggcctacaagttccatgnggggtnctatgnngacactgggnaccttttnacagagagctgcagctatctctcccaagctccgttccatacgctgtctactatgacaacccccatacggtgcctcctgataagtgccgctgngcaggtcggcagngatcctgagtgagggggaggagntngcttcacctgatgtcatccacctctatcagaaattgaggcttaaagatattatgcttcccannacntacnnatggggtcatangtaccttgccttacnccacccncatancnatctggntggnctgcccgccgagtncntnctgcattggatncctacatcaaggagcagatgctgtgtgcaccgt

SEQ ID NO: 2883 - DNA, 502 bp, Homo sapiens
gactgagaccctctgcagaagctgagggtgagcagtacattcaacagaagagggagctgctggccctctatcgcaaccagggcacggagtcccccagcaccaggccctccacaccttcgccttccccggaggactcccagagcagtgccgaggggaggactttagagttcgccatcatcccccgcctggtggtgactgaggatacagatgaagacacgccctccatgccggatgacgcctcagactctggctacggtaccttgattccaagctccccgaaggattctcattcccccctgaacaggcttcggtccaaggctcttcgtagagaccctcgcctcaccttctccaccctggaactcagagacgtccccttgcgcccccagcctcccgacccccaagctccccagcggcgaagcgccccagagttgccagaagggatcctaagaggaggcagtctacccaggagagccccaccaatctggtcggaggaggaagacga

SEQ ID NO: 2884 - DNA, 501 bp, Homo sapiens
gaactgagactatgaaaaagaaaagacaaaaaggcatgattggcggcctgtgccttcctcttccctgccaatctacagagctgtctgggtctgtgggatccggaaacataatcacaagtgaagagtctttagaattctgccagacttggaggtcagaggcctgttctgcaggttagaggaagcccctccagcgtgagtcctgtcctacggatgctcttgctgaactaccacccggaaggaaaggaagtcccagaaagggtggcggcagagcctcgaagtacgacctatgggtgggaaatgctggtcacagaacctcttgacgctctgggctcctccagaacctccaccataagcatcgcgcctgtgccatggcctcctaaggcggagggagtcttgacctttatcaccaccgaagctctgagacgcctgcttaaaacggtgccaactctagactgggagcgattcaatgcaaattcctctggtcacctgtaaaaaaaaaaa

SEQ ID NO: 2885 - DNA, 501 bp, Homo sapiens
  misc_feature (1)...(501): n = A,T,C or G
gactgaggcgctgtttngctatgtagtccanaatagcatcaaattcgtggctctcttcctgtctcancctccagaaagcacatcagcttcacagtgtgtttcaaagaggntgagggcaaagaaactctggacctttgggcaggctgntctgcccatttctctctccaggcctggcgtggcttctaccaatgtttgaggccctganaagagcacggggtgtcgcctcccactcctcctgacngncgacaatgatccagtcacagggagccatccatcagtgtcgggggaaaagagtggccctaaggatcctttcccgcacactcttcgaagctgctgggtgctgatgggcaagacaaggaaggatgccaggggtgggcagactcgggaaggcaagccctggctcanaactgcggacgcccttcccgaaatccctcaggctccggccagtggccacgatgatgaggctctcatctcggaaaagctggtgcagcggccagggct

SEQ ID NO: 2886 - DNA, 498 bp, Homo sapiens
  misc_feature (1)...(498): n = A,T,C or G
taggaatggagaggatgatggctcatctctgngaaaactatntccatgattatagcaacctcctctgccanggggncnctgngttacggngntcatggatgcatgccacctcttgctctgctcttcttgagtgcgntttggccttaanaacancgcaggcacaggnngaggcacaggcacccattggtgagcaggttccaactctgaccncttggggggatgntcngacncctgnntgaagcttttacctcacncacctacagantancacaggaacagtatgtgaaggnngacaggacactgtttactgatgaagctttaaanccttnnccanncgtgccnanccnntggtaannaccagaccccacaagaaanagggggctatgcaaacgaggtggcctgtggtctttgactttctgngtgntangtntgtgcgctnatcacggntctgaacantgtacaanagggtcaacaaaggcgaaaggtagcaaagatgtt

SEQ ID NO: 2887 - DNA, 498 bp, Homo sapiens
  misc_feature (1)...(498): n = A,T,C or G
gactgagcggcattttgtngcccttggaaccttctggcccagacgattgagaagcggaaaaaagactctcaaaatctagaagtcagtgggcttctcagatatttagtttatgggttgntacgtcacaggaccacntgngtcactacctctncctcttcatggnatacgtcgntccctcctgaggttnccncgngccngcngcannaggctcctgcnggatcggctgttntntgccccnactnttctgctgctgtccnncntncncatganctcgctggnggggaanaacgncagggtntttgatgncnanangangagtggnntctggcccacactgcagntgnactggaggatgtnngcacctttgcagttcattaacatcaactatgtgcccctgcagttccgggtgctctttgccaacatggcngctctgttctggtatgcctacctggcgtctctggggaagtgatgtcagatacaccgcggatggggtctggg

SEQ ID NO: 2888 - DNA, 490 bp, Homo sapiens
  misc_feature (1)...(490): n = A,T,C or G
acaagtacgcgcggcttcngacctgactgacatncntacgngcggccgactggggccacctgtgaccattctagcgtaagtgtcgtgaanagganttgcgnctgcacaaaanagcccggnagcaatgctncaacaactagccacagggtctggggcaggnggcangagtcccggcctggcacaggatctcgcgttgtctggngaaagagcggcgctgaggtctttacggtggcgttgtgggaaccgcccaccacctctcctttaaatcttntttctttcttctttttttctctgtcctctcagcctcagtgtagacagtgagcgaaagagctcaaggccggcagctctgtggaagagttatggctgccatggtcgcgcagccggtgcctcagagtgagagtancanaagccacaccgtcgatcgtgttaagatgctagggtttgctttggccttccccnttttttatgatgctatgcaaaccaaaaagcg

SEQ ID NO: 2889 - DNA, 488 bp, Homo sapiens
  misc_feature (1)...(488): n = A,T,C or G
acgcgagagccggaccactggcnggaacctactntngcgaangctgggatctncattggtagctgccctgaggtaggtanaagccantangagcacactgncccagcatggnaaanatgcntatggggaagnnagctaggaggggagatcggnnctnnggcnactgcagcncgntcagcccctgtaaccaaanagtcatccntnctgagagcctgncttnnntcantngatancanataaaacccctnaactatgcctgcttgnatgacattgnccacggagtcaaggacttgagcacncagttgntacggaccgggaccctgtctcgcangagcataaaggcgcctgctacacctgnttncgccacgctggggagaccaccctggatccctgagccggtgnagctcccaagacgngccagacggcaagctctccgctgcctcctctgcctcttacttgncctcggcaggcatggcggaaggagccag

SEQ ID NO: 2890 - DNA, 487 bp, Homo sapiens
  misc_feature (1)...(487): n = A,T,C or G
gcagttgcgcatgggcaaggacccactagaataacgagcctncgntcacagntccctgactngatcatgagccgcggccactaagtactcacactacctggcgatcggttncaagtacaaagaaaagntggcaanctgntcacctacatcggagtactacnaggcctgccggcggtgctgccaaggccttcctcaaggtacggntnctgtgcaagcaagtccacaggtgacacatccctctcctgcgcattcttgcccctntagcaccgctgtgtgttatgggcggagctnacttgcggtttgcactccacttcaggttgctcattcccactaggagngtcatgccaccattagtcacgngtgaattgnttgtcactctgtgtctcgtctcagtttcctcaagtacaagattttattttgcatatcaaatgtgcattaatgtgtgtgtaattagacatggataatagttttgcttctgtgttacaca

SEQ ID NO: 2891 - DNA, 483 bp, Homo sapiens
  misc_feature (1)...(483): n = A,T,C or G
gactgaggacattgcagacagaggagaaaagagagacggagaaagaggtgggcttgctggctttgacctccaggacccagtgtctaagcagaagggaagctcagatccatctcaatgccagtggtaggtgacaacagnttgncagtcaatgtncnttcacctacccatcatccctaccccaccatnctaactttatagatgggaggccagagatagtgactttctcaaagtctgccagtggngtaggacttaaacttangaacctnatgacttctcaacccagtaagacactactccatcgagtttgacttgncacctggcagcccagggngggtctaccctacagacagacaggcacatgccatcaccccagggtgggcttccctttgtcctgggaaccccacctggagacttctctggncacctggncctcctgtttctctatcttgccctgaagaaaaaatncagatggactaccactgt

SEQ ID NO: 2892 - DNA, 482 bp, Homo sapiens
  misc_feature (1)...(482): n = A,T,C or G
actgagacctgttttcacatgtggcggcattcttaccggacagtctggatttattggcagtgaaggttttcctggantgtnccctccgaatagcaaatgtacttggaaaatcacagttcctgagggcaaagtgggcgtcttgaattttngnntnatagacctggngaatgacancctgngtctnctatgacttcgcggatgtgnactatggccacgccaatggncagcgtatcgggcgcttgnggggcacattccgacctggatcgntcgtagccagnggcancangatgacggtacaaatgatttntgacnccaacaccgggggaaggggntnnatggnaacntactctgccgctgcgccagatggaaaagganaccnntattgcggaggacgccttgaaaaaccttccggtacctttaaaactnccaactggccagacngagattaccccgngggagttacttgtgtgtggcacatcata

SEQ ID NO: 2893 - DNA, 480 bp, Homo sapiens
  misc_feature (1)...(480): n = A,T,C or G
ccttacttccaggcagnggccattcatggccttcttctggaaaaatatgnacagtggatggtgtncttggggaccctggagaagtggcatgcctctctcttcccanccttcggggcggggctcaccagtgggaaagtctgtaaaaaaggagtcagaatccgcatncggaccttctctggtgcgcagnaatagcaggtccacggagcagcgagtgaaaaggaaggatgacttaggatgttgntctcagacccacagtagcacgaagctttggaaggtggctgccatgtgacagctgctgttagctcccgccgatctggcagntccattggnagnaaagacagntgatggactncncctgcttggtggacgaannaantggcagtgggaaggataatttctgcccggnccttngaaaagggatccaccgnngtcagtgataaggacctgcccagcacttgtanagtaccgagacagtagcag

SEQ ID NO: 2894 - DNA, 471 bp, Homo sapiens
tctgagggtcagacatagaagtatggttcacttgggggcccgggctgcaccctgagctgccagcagtcttctacatggtgctgaagaccttgaaggcttaaagaagtcatggagagcagccgaggcttggtactatgtgagatacaagccaggccatcaggcttggaagaacaaaacaggctggacaagaaagctatttcacctgctcaggaggagacacagctaagccgtgctcggcgggcacatcatgtgtaagatgctgcccctgtgtaagatccaaccagcccttttgggcctagattatccacaggaggaaaatacaagaaactgggcgccctgccaagaaacacagactcttcacctgtcaaggatcctctgctgagacccgtggatgataaagaggggacttgagagcctccccaaccgcgcgtctacaacactaaaagcatcgaagggagctgatcactgaga

SEQ ID NO: 2895 - DNA, 469 bp, Homo sapiens
  misc_feature (1)...(469): n = A,T,C or G
tccatgatgccgtaantcacccatgnanagctntcctgncattcancnacnacctgctcncaaggngattcactacantatganggaagccnanggnangnctnccntattggaangncntntngtnaagaatttnctnttcnacntgaggcagtgaacaaagaggaagcatggactggcttagagactgtacttcaatgcaacataaangagacaaacctcacatccatagaactgaacgtnttcagttgagtcatccanactgtttgatttcccatcaaggacatccagatgaacaggtcccccaactggtttaaggccagtacagaaaatgtcttggggaaaggtttctggagcagcacgctctgagccacttactttctggcaggtgttcancacattgatttctgatcaagaacacaaagtcttcagatgaatcataatgtccanatttaataaagcaacagga

SEQ ID NO: 2896 - DNA, 469 bp, Homo sapiens
  misc_feature (1)...(469): n = A,T,C or G
actgagattatagccaaaccatntgccatanccctcancattcaagccaatggaccacatactgcccagccaaatgccattctggaaaaggttttcactgctatancaaagcatcctgntgaaaagagattacaagggctctccaagcagcgtggacgtgggatgttcngagcattcaacgctngtttngacaaagacgcaaccaggagaancccancactctgaccaggntctgnnagagcatgnggagattttccttntacctctatgtatttagctacggagtccggttcttgaaacaggtaggcactgcctcaaattccttcatatagcnttttacatggctatcggcctatatccagtttttaataggtgatgacttcaaatactgtnacaagtttccaaagaattaattgnacgnttaaattggatttattaaaaaataatatataacgttcaaaaaaaaaaa

SEQ ID NO: 2897 - DNA, 469 bp, Homo sapiens
  misc_feature (1)...(469): n = A,T,C or G
ctgagctgaggtactggngcaagactctcacacagagngcacannagtnagaagcaactgancctctaggacgcgtgcgcggnngcangaccaggatctgcncntgcgcanttgttgngaccatggncgncggcggcatcctgnatatggaacacggagactgaaaataaaagctcatgaatgttcctgaagaanaaagtatttcctttgaggtagaaatggaggganttacaaganaggctcccctgcttccccattttatgtgataantgggacgtgnganaaccaggaaagaaatttgaggcaatctcctttaattgatgagaaaacaccaggcccnggaagcaaattgtggccatgttaatttgggggagcatttgagtacaaacccancccttataccctctcaaaganttcctgggacnaacngcttccatgtttttaactcagatattaaaacttttgattg

SEQ ID NO: 2898 - DNA, 467 bp, Homo sapiens
  misc_feature (1)...(467): n = A,T,C or G
gaactgagacaggtaatttccctttctaagtggaaatggaaggaagcatttcctcagnangtnantgctgaangagggctnnggtgacatttcangcngacctgaanaancccgagggcnctnngnnactggtagcacagttaaatcctcgtgtcctgcanagtcnnnggacactgtagancnccntnaacttgnangaacnatttcacgcacgctttttgnnaangntctggctcctnaaaaagccaaactgagaaacngacgctcatgaagctgtactccagtttgcagtcctgggctgaagacaatggccatttaattgcacacaaggtcaagatcttttgattggcaggctgacagctctgtagaagtaattcttcatatggaattcccttgaaatcaaaggcatcatcatgaggagattaaaaaggaacagctgagtggactgctcatttcaaaaaaaaaaa

SEQ ID NO: 2899 - DNA, 466 bp, Homo sapiens
acaggaacctagggctacagcagggcaagccctgggcattgctaagaaggatagactttgttctgtgaatgaagggccatatcagcaggtgctgagactgggttcaaatgtcagtgaagtccatggctgagagaaggatttgtcaacttggaacagagtccagtaggatggaaaagagagatacagtttgagggaagggcaggaggctcaaagccgacagcaagagcagcctgtaaggagagccaccagcccctcaaacctgcgagatccaaacctggaaccattcgccaacgcagagtcagagtggcatgtcctgcctcatgcctgtaacccgagaactccagaggctgaggcttcaggagctcaggttccaggttagcctaggctactgagagcaaggatgtctcaaccccagtaaaaattgaaccaaactaacaaggaagtcataagaaggtaaaaaaaaaaa

SEQ ID NO: 2900 - DNA, 466 bp, Homo sapiens
  misc_feature (1)...(466): n = A,T,C or G
attttcctgctgttctttggnactgttcttgtggaacagcaagnatatgccggccaccccttggcacagcctggcagtagcaagcgacagtgaggaggacgtgagtggntgagcacccatgctaacgctcagtgatagccgcgctgggcactnggctgcctgaaggccaagtgnaantggagcagactgtcccangatgccccagactatcagngtcactaaaatccgtgtgctactcgggggacagagctggcagcataggaatgagccatcagggcttagatgccactgtttactctgctgcagccttgacacgtcctgtgctggtccctaaagcanactttnctcagcatggggcgaggtggggcttctgtgcccgactgcagacagcaggcattccagtgtatgtgatggcctgacaggttttgttcanagtagagaaaaggttgtgaataaagaaacagtt

SEQ ID NO: 2901 - DNA, 466 bp, Homo sapiens
  misc_feature (1)...(466): n = A,T,C or G
ctcttgcaggggcacgcatggtanagacacaccgggtacagngnnacagaactgtgnattncttctganttgggcttattcctancacntgnacnccatacnggattcntgngncantancaantanttgnanntctgactgggccacaatgctttgtacttcaatcagcctttcatctgaaaccctaggaccatgccagctggcttaattaggggccccaagccacctaagtactgttttgtagctggacagagcacagaanagagggattaagtgatttgtccaagattatactgcagagatgtgaagacctctnttttggggtaagaggggtaccccancttctgcctgccaccgnccctttgcttgtnnagncttgtcctatnagggccctgagcactcanctgatggctggaancctgggggacactganagggncccttaatactggcagccgccatcaa

SEQ ID NO: 2902 - DNA, 461 bp, Homo sapiens
  misc_feature (1)...(461): n = A,T,C or G
gactgagatgctgggaatacaggtacaggccacctcacgaagctgggagaaaaattagttgctgaaataaattttaaatcttctacttcnaaagctaannctctgcngtgnnngcacagccngctctctancattnctaactggctntctgcacctnaagtgcanggccaatccccnnccctggaagaagnatccagcaagttagctcctgaaggcctgacctagctcggactgaacagtctcgaccgatataaagtngcacatcggtatgaaacaggagctaatnaccagaagccttaggaaccattcagtgcataggaattcnaactgactatggttagagagccatnctcttantctagacgtgagtgnantccaatngaagcatcngcantgtaaccaatnttacgnacantattccnnaanatnnccactctgcatantaagaaccagatggaaat

SEQ ID NO: 2903 - DNA, 459 bp, Homo sapiens
  misc_feature (1)...(459): n = A,T,C or G
ggcaagacgaaaggggtncntgcactcgggtagngaaaccttnctttaaggcctnttnccccaacaaggaaaggtctctaattatggaccccttcncttttcaagncnaggtnggttatttggcaaaaggaaaccaaccggccgganaaaggaagnaacnttccccaaaggggttngnagngggcnttgggaccaagagnccccggggtaagcctattttaaggttgcntcctccctttttcnagggaagnggaagggtaagatcggccttgnaaccaaaaccggtttnaattttttttacnccaatgggttgcccnttggccaaggaaattaacctttccccaaggtnggtgaatttnaatttttttttttaaaaaaccttgggggggaaatnttttaagggggggttntcccaaaaccttaaaaaanttccncnccaaatcctttttttttaaaagg

SEQ ID NO: 2904 - DNA, 459 bp, Homo sapiens
  misc_feature (1)...(459): n = A,T,C or G
attccgaacgccgggggatntcacaactgagngtctagggcacgcaaagttngtcacttngggcatctnactctactggctgtacancnctttanacggcgccccnatggttagtantggnactgcccttactncaccacagtaagctctatncgtaggacgcctgnaagcaccttntgggagnttcttttgnnagtaanaagaggnaactgcngacgcaggattttaatgtntgggcaannttaaataacctggctgtaaagaaatggtatatccaagaaaattcagnggagaaggcaagnaatnntnaccacanattctgtaattggaaaatgcanggnagggaaagatntttacattngggatcttacnggactaggaggtccacacgnaaaggggctgatatttgatgngtctgtngntgnngcnccaaggacatgttnggattcgaagtgccct

SEQ ID NO: 2905 - DNA, 458 bp, Homo sapiens
  misc_feature (1)...(458): n = A,T,C or G
gagaacccacgagctgatatggaggaaccttcacagctgcacctcggtccaaggcaatttgcttaaagaacttctaagggaagggagagggataaagccttccctcccaggcaagcccaccgattgccagccaagatctgcccgcccgcctgggcacctgcttctgcagtcgctcctgctcctcctgctcagcctgcgccttctctcgagcctcctgctcctcccgtctccgcgcctcggcctcacgttcagcccgggcttcagcctcccgggccagctgctcctctcgcattcgcctggaggacccaggaaactcaagtttggnctgcgcctcttcttcaggcactctagggaccctcacagtccccgaggtcacactcacttgaccctttcaaactgcagcttaacgatnctgtnctncangtnccctctgntcccnagcctggcgccgcttttca

SEQ ID NO: 2906 - DNA, 457 bp, Homo sapiens
  misc_feature (1)...(457): n = A,T,C or G
tgagagtgcatatggacacgttaataaagatgggtcctgttgaccaaganacaaaatgtccacactanggactggcctgaccctgcagacagcacaagtcaccaggctgntaaccacatncacattntgggctgnggattaacaggtggaaagcaccaggagctgtnaaccccaacccanaccctaggaccctgaggcattactgagacatcaccgaaggccangaggntgatgggatgggaagcatcagaactaggttgntggggctatgtctgctgatgctgatgnccctgnttcacaagncacgaantcaagatctnacctggatggntcacccgagcagggtanactgnactcatacatttaatggcacctgcctcaatttcagtggccttggcctgtccctgccaaggagccccttgcaggccagccatgctcaagtcctggacctgtctaa

SEQ ID NO: 2907 - DNA, 456 bp, Homo sapiens
  misc_feature (1)...(456): n = A,T,C or G
cttcgggtgagctgtccaagnaatcagaagnatcgcttgttggaagtgagagtgttcatttggcctgtgcagtcatttctaatgcctagcccggagctgcaaagacaccttcacagctccctcaggctgcccctttaaggtgaccacagtctctctcctactcctagtccctgagaacaactcaccctcgtcagtgaatcagttctttcaccccactggtatataaatagattcctgtccatagtgttctttgatacaatttcactcagcattttctcaggaggcccacccaccaaagctgagttcattcttcattgttgagtagcaagcaatcttggatgtgaacgaaccaggggngcttacctacttacattttgggaaaaatatcccaagntattttatttatttgggggctattacaaataaagctgctgnggaacatttgaaaaaaaaaaa

SEQ ID NO: 2908 - DNA, 456 bp, Homo sapiens
  misc_feature (1)...(456): n = A,T,C or G
cttcttttacactgaacaagtaccagggctctctgccttttggagtgagttcagccaccatgtcatcaatgactgtaggtctgngctcccagggccagcttggagctgtcataancgggaaaactaccatcaagatgtgccaatatgagactaagggagttttcaagagaggggtggaaagactctaanatccagaggncaggaagcactgntgtacaatgccnnctcctggacgtgacagatcgtccatngnactcatgagctaanagctgctggccacctgcacaagatncanctggtctgccatttnagcatggtccaagaatgggcacacaggccnnagctctaggtanggnaccaaatcgctgaggactggctgnggaggnctgnaagtgcagtccnatgngtgnanntctcctgccgctgacgtcaggccnnctccgtgagtgactacga

SEQ ID NO: 2909 - DNA, 452 bp, Homo sapiens
  misc_feature (1)...(452): n = A,T,C or G
cccttgctatgatttggcncacgtgaaagttccgtaaangggttgnagaactttctcttttcctttnggaccacctnaaataaagggctggggnangcaactnctgancccntgtacctttanaggganagggagctntttcaacatagtgtggccgaggactttacacggtaccacaggtgggataaannccngggcaccggggcttggctagtagagaccatgaacatgnttcattngcttgacatctgttgataaatgtngagacgtagctcatcaagcacgctgtaccntgcctgntgntccagngatcaccatngngacggattgncactnctgctcngnatttnnttaggaagcctggctctntngtcntnacgacngggangcanggantgatttgcngcnaagcnngngagcttgggaacagaaatgtcctggggagaacgggg

SEQ ID NO: 2910 - DNA, 450 bp, Homo sapiens
  misc_feature (1)...(450): n = A,T,C or G
acaccatgcgcctttatattggacnnganattattgggggnnnatggtccncccatccncntcnntcatngctnnngnctgaacaggtcaacantgtagagngtttgataaaagtgagcctnacnccaggggctgtcanagagaaggcgggggccccngtgaggaggctggancccgagcaccngacagccaatcctaaggaaggacactggaanaaaatgggctgggccaatttcgggaaatcggaagtcattcctcctcctcctcgcctctcccgcccgncccggccgnaggctggcttccgcttncgggtggcgtttctccgaggctcnctgatgaagctgagtggncgncatggagctttcnggcgagtacgtcgnttgtgacggggagccgcagcggctacgagtgtcctgtgaggcgtcgggagacgcggaccctctccagagc

SEQ ID NO: 2911 - DNA, 449 bp, Homo sapiens
  misc_feature (1)...(449): n = A,T,C or G
gaactgaggttcgttttcaactggcgccgccctncccggtgcggncctgagccgctgntggtggccggtgcaccgngcgactatcatgagctgnaggcaccgnccctgcanagcagcctggctttgagtctggagctgcagaacgcgcgcgccnctgtccgccagcgnccagtttgatgcctncaaggccggtaaaggagnagctgagaaagtngttccgnacccagctgtgccctgnaggagaccntggngnaggggttgaacgtgccgtnctctaagatgactctactcgatgacactgggagagtctgcaggttcccaaggagnaggttcatgaactctggantgataggagaagcatnntgattgcgtgnctncttatnccnngagccccgcccctgaaggaggtgctcgggccgggcccaganatgaccatgctgtgcaaccca

SEQ ID NO: 2912 - DNA, 449 bp, Homo sapiens
  misc_feature (1)...(449): n = A,T,C or G
gttcctaagaggacaccacacaagcaatcgtcagccaagggagctgtgcagaccccagacctgacatggaacaggcctgggcacgctaacggaataggaaaacattctaaaatccaaagctgcagggatggcaagacggcttagcaggccctgccttntntatacaggcatnacatcattaagtaggagctnatacactcnangcctagcggatcatnnctaacnagntnanagnnaaatngcccatgaagtncagagagattgacttgctgtttccaacaggtagctggactncaaaaacnagagannccntggnngntcacngcnntgtgnanananatgtgntgcnctgttntggtgtnttnganccacagngatgtacgtatgcatatatgctcatacacatngcccactgtanttatttatnnaaaatccaaagtgccacataa

SEQ ID NO: 2913 - DNA, 445 bp, Homo sapiens
actgagggagagcctgaggaactgaggtacactccagactggatgctctcacaaaccgcaagcgtctgtgactactcatcatccagaaggagaggaggccagagcgaagaccaagttctaatcccgtccctttgacgtctaaagattcacatgactgaagaaaaggacaagattaccagagcatctgcagaatcataacgtgcctgcatggcctcagacccactctacccgagagtccaggcctgtcacggaagtccaggagaatggggaatggatagtcaccctgcaaaagcccttgctgatccagaagtagaattcctgtctctttctccagcatcatgcctgtctgtatcctgccgtgcttctcgccatgacaataaagggctagtctgaacttgtaatccagccctattaaatgttttcctttgtaagagtaaaaaaaaaa

SEQ ID NO: 2914 - DNA, 440 bp, Homo sapiens
  misc_feature (1)...(440): n = A,T,C or G
aagcacttcacttggngcaaggnaaactgcctccaccccagtttaatctcaacgatgaaaatgatccaatgaaagcagatattggcttggttattcttgaaaagcctatcggtggggatgaaataccactatcccagtgcccctagtacatccctgaagaagctgttctaagtgccaatacaagcagctgttatgtgtatgaatatcagagtagcaagtaaacttggaaccagcagtagtaaagnaagatagatgtgcagctgctagatttctcaatgtgctacccccaacattccagtttaganaaggccgtgggcttgtgtattcagagccaaccacgggaaagactgctgggtacagagagccagtcctgttctatgtctttctaatgaaccactgggaactancgggccttatncataatgacttccaagatatgt

SEQ ID NO: 2915 - DNA, 425 bp, Homo sapiens
  misc_feature (1)...(425): n = A,T,C or G
gtgtggtggcaccaactttntcctagcactcacnaaacagntntatggntncngngagttncatgccnagcnnagctantagcnacatacgtgaaaacgtgtttcaaannanattttacanagatnattnntnttntgagcacactgggnaatagccanaacgtccangcnaatnanacnaactgacaccagttctgaggtgagaactggcttggcctacacaaggagaagaaacgcccagcaccacggaggcataaaccaaaccgtaaggctagaaatgaaggcatgaactaggggagaaagagaaacagctttaaggctttaaagacactttgggcgttagacactgggaagcattatgggttgatgcanaaggtgcccagggaagtgggagatcatatagggcgggaaacctcagccctgag

SEQ ID NO: 2916 - DNA, 425 bp, Homo sapiens
  misc_feature (1)...(425): n = A,T,C or G
caacgctgcagatcagccgtaccaccagggggggaaacgtatctcctgttgctgactgtgatgctaggctgggttgcccagtgtgtgtaaaatgcacttttgagttaccgtaggcttaaggataagtaaagccattgtaagtcaaggatnatntatgcatctgtgagagactatgaaggaatttgttactgcccacagtagtgattcgccagtctaactgccatcatcaggtcccaccccaagaagacatgcataattataggctttcttattttcagcgtatattttgctgttgataagcataagattgtgctgcctaaaagaaaattcgcgtccctaagggtctgggtagcatgctaggcagaagaaaaattaaaatgtacatttcctctcaattgcctcttaaatcatgaagaataaaaaaa

SEQ ID NO: 2917 - DNA, 423 bp, Homo sapiens
  misc_feature (1)...(423): n = A,T,C or G
cacctcacaatctagatattatgnngctttttnnnngggngngnctatttctttccttcccgttcaaaaactcaccaggtcactcagctgcctgtgtgcttgatataaattcagttcccacagcgctctcaaggagcgtagagagaaccgaaccaaatcctcttaagtagtcctctgatctactcagcacctctgactgctctcacttccagccccaccctgccaaacaaattaacaaaaaagcaaaacaataaccanaataataatantaacaaaaataccagatgcngactggtctgaaatcatcaaaaacccanagaaacatctatgcttgagatgtctgtaaaatcttggttgcagtcacagagactaatctcttaatctgaataaacatttctttaaattcctttttttaaaaaaaac

SEQ ID NO: 2918 - DNA, 423 bp, Homo sapiens
  misc_feature (1)...(423): n = A,T,C or G
aggtacgtaaccacatgaaatgaaggcttacagacagcaaatgttgtcctgagtgcacggcagcagcacttcaatccttacagaatcgacccagtacagcactgtacaccacccaacagcaacgtctgcgtaggccaaaccccactgtgctccaacagccgacgaggaaacgaggaagtcctctggtaaagtgccccactgggagagcactgcaatggcattccatctgctctacagacgcagctgatcatgaatactcatcggagcctctgcaacccctcacagcttcacacacatggcacaactcatgtcacattacntgaacacatcttaagagctttctttctttcttttttaaacagtcctgactttgggtaaagtaaaatgtcccttatatacaaatatataaaccctaactactaa

SEQ ID NO: 2919 - DNA, 423 bp, Homo sapiens
  misc_feature (1)...(423): n = A,T,C or G
ctgactgggccatgcctgcnttactgctagaatngtctnncgctngcnaccactgacagcnnttngacntctggtncnccntgccctnctgngngggncccngcttntaanngagtgnacaggggtanccctannctctatactcttataanngggaaccgaaacaattgtacgttcntctttgaggnagannngacaatatttaagnacganntcatagatacctatctgntaatacagaaatcccatttctaagactctcttctcaaagatattctagcgatctcagcacgctggnacaggnttgtaactagcactcgggtgactgaagcaagaagactgagagctnaaggctagcctgggctacatanatagtatgtatgtanccngtgttctgaaagaaaagaatgttggcaaaaacaa

SEQ ID NO: 2920 - DNA, 421 bp, Homo sapiens
  misc_feature (1)...(421): n = A,T,C or G
aggcacctttgacaangtgcctgcgagccacgctgcactatggcccgccgngcnntggnggntnnggaantncctatgantatggcaccagntataggccnaccttatcagagatntcnnctatggtgccacnatntgnntccnccgtnagtgctaccctacgaccnctgacccacccccacctggaccctttgttngccggnaggccccttatggcgccccgcacttcgacatgccgngactttgaggatgatggaggcccctatgggcgagnctganantactgacccacctatccgaggcactggttggccttatcggncncanagacacctgtggctncttaccagaanctgaggaatcctntgagcgtggangctttnaaggagccttgtttgagccctatgagggcctataggcc

SEQ ID NO: 2921 - DNA, 417 bp, Homo sapiens
  misc_feature (1)...(417): n = A,T,C or G
cgaaggtcctcagggtctcgagatgaacgttatcaggtcagatgttcatacngangctgtccaggcngctcttgctaaacacaaagaaaggaaaatggnagtncctatgccttccaaacgaagatccctggttgtacagacctncatggatgcctacactcccccanatacctgttccggttcagaanatgaaggntcaanacngggtgattcccagggaacccccacttctanccagggcngcatcaacatggagcattggatcagccaggccatccatggctctaccacatcaacaacctcctcctcctccacgcagagtgggggcagtggggcngcacaccggctggcagatgtcatggcccagacacacataggtgagtgagatgcacgcagctaggtggatgggtgcttttg

SEQ ID NO: 2922 - DNA, 416 bp, Homo sapiens
  misc_feature (1)...(416): n = A,T,C or G
gacaaatctcgtacctgacgaccctacctgactctgtatgagnangactncccgcgngngggagtcaccactctgaacttggnnaaccggngggnggagagcctgcctagctgcctgccgcgcacgctgcgcagcctcgatggcagccacaacctgctgcgcgcccttagcgagcctgtgctcggccgcctgcccgagctgcgcgtactcacgctgcaccacaaccgcatctccgtgctacactggggccgtgacacgctggccgagctgcgtgagctcgacctcagtcacaacctgctgaccgagctgccgccctgcgcggggccctcggggagcagcctgcgctcgctggcgctggccgggaacccactgcgagcgctgctgccacggacctttgcatgcttcccagcgctgct

SEQ ID NO: 2923 - DNA, 415 bp, Homo sapiens
  misc_feature (1)...(415): n = A,T,C or G
aggaaaaggaggaggcangataagtaaggangaggaggagaangacgaggcnagaggaggangctgnggangaggangccgaggaggccgatggagtccgataccccacagnctcgcancagtngatggcgccgcngcccgggcctgtgcttctgcggatccatgancncanntagcggcggganaagagcatcttncagagacccatcgaggcccgggccgggcccggcggctctntnnggtccnnagaattgagccagcatcanaaggttcctgtgccagttgctttgctgatggctgaggccttttntgccagctttcccaaagggaagagatatctgtacctnttcatacccaaganatatgtgtcaacagcgtttggaattaactataaagantgccccttgtatcacaa

SEQ ID NO: 2924 - DNA, 412 bp, Homo sapiens
  misc_feature (1)...(412): n = A,T,C or G
aggctgttcaggtgtccctatgactgactgagtctcagcccatggctgacacccaggcactactagctcgtgacatccagccttgagcctcctgggcaaactccagttccctggggtccattatctcagccgatcacagagggaggggcacgagtctcccttcagaacatcctatgatggataaaattacagtttattggtgatcaacccagcctccaacccctccttncggattgaggaagtctaactgaaaccttcattgctccaaattgtgctccagttggctctgggcagatgcccatccattggaggctatctgggagttcgcagtcagcagtgaatgacagacgagcatccaatcattagcatgaaaaaaaaatgcttatccttttggagagttcaaaaaaaaaaa

SEQ ID NO: 2925 - DNA, 410 bp, Homo sapiens
  misc_feature (1)...(410): n = A,T,C or G
ctggctccacactcaanagcctgccggcgtcaccttagcttcccaggnctggtntcacagacnngtagtacncggganccagctcacctgaacacgtnggacagnggngattccttttctaagctgaggcgctggaanntganacccgtggaagcatttcatttatccaaggccnnacaggcaagcccagggcagagccaggctttgaaaccantcagccgccatctcgatgcgagtnctctcatccccaacgtgccttcagagtggctcggatggtagcctagactcctcgngaagatcctccgggacaagaaagctgangtgagagctctncaaacccctatttagagtagagctaggtaagccgtcaatcaccagagtcattaaagaaactatgcgcgaatatacat

SEQ ID NO: 2926 - DNA, 409 bp, Homo sapiens
  misc_feature (1)...(409): n = A,T,C or G
gactgagtttatgcttgtgagggctggtactcctcagccagcactctgcccgtctccttggaacctttgctcatgaccatccgagatgagggcctacacactgggcaaggagatctgcatctggggccttcagctgacgaacccggagatcgccagactcgctttgtttntggagcagaaggggcncaccacttgcccagngactacntnggaaatcattgattgcaagatggatctgtggtctctggggcgaccttggnaaagctctgcagntcagcanttngcacttnctggtcctcgactactgnatgtttggaaatgaanaacttganagtatnttntnaggcctggagagcaaccnaaggctccanggcctcantatgcnctacngtgggctggggccccacag

SEQ ID NO: 2927 - DNA, 408 bp, Homo sapiens
  misc_feature (1)...(408): n = A,T,C or G
tcccctggctggacccgaaaaaagggctgcagggctgcggtttaaagcatgaatggaaatttcgagccttctctcccactaccaccccccatgcattgctccagcccagnctgaacaccacgagnttttaggatcgaactgaactgaatttctgggatcaatgntttccccataaaatctgaacttcnnttggnccagcctgtttggaaaaaaatngngaagagtgctttgaggctcccaggagatgtacagacttcttcaacgcagaagtgnctntaccttcaaactggggacacatacctatacatatcattgtatatatcactgggggcatccaaactacacatgttttccactccatgactctgtatactatgaaggctaaaggngagactttaaaaaaaaaaa

SEQ ID NO: 2928 - DNA, 407 bp, Homo sapiens
  misc_feature (1)...(407): n = A,T,C or G
gtcagatgaccctgcattgtatcaagtagaaaaatgtctaaccaagacagaggagaatacgaaccctctcagctcatagacaggtgatgatgtggtttccaactgactttcaagcaaacagatttccaagcgtgcttgaagagggcagtaaatgagaaggcacaagatgctagaagagagaggggtntgctggaaatcgtggctgaccacctnagaaggacccagaagacccnaactttctggttttgcctttnaccttgctctgaaacttctcccaacactggaagacaagaaagttccgccctacctccgccccacctccgccccccggaccagggagattcttctctttgngcaagcaggcttgctgggcaatcgtgagctgctgagttcccatccgccacaga

SEQ ID NO: 2929 - DNA, 397 bp, Homo sapiens
  misc_feature (1)...(397): n = A,T,C or G
tgcctgtgtcaacctatgcngaccgcantgctaccaagccttcnnctgnttccangttcatccngggcataccctggacncgtgncatcagggctgnttccattgctatgcgtgaatttcctctacctgantgatctggggtccttgnccagaaaccatctgcagcctgatgtcccatgagtaaagactgtgcgtgtgtggnnttatagntcttggctcttagaaaagnctganggcttncagngaantgggganggaaccgaccctatgcagtctnttcaggctgngttggagggtcactcctttctaagnctccctggaaggctnagaaagctctttaagntgancctttgatggaattnngtnacaggaatttgnaagttgcctgaataaaaag

SEQ ID NO: 2930 - DNA, 393 bp, Homo sapiens
  misc_feature (1)...(393): n = A,T,C or G
cctgctactgccaggntgcgcatacctgccatnttacctgccttgnatgcgacataccctgtgggaaccgtgangcccaaatnacactgcgtactgtaaatggtaaggaaagcaacatacgaaaaaagatgactnctangtgcacctcnnatgctcctgacagcagaaacaaataagaggtatgaccctggctgctcagcancatggaaaatacccactttagccacatacgtccaacagcaccacatcagcatgtgttctnctcnagttccatagaaagaaccgacccatctnctnaagcnagcaaaaccagaagctctggtgacaaaancagcatgggcaaaaatcgtgacaaataaaaatgcattgngggttaaaacttaaaaaaaaaaa

SEQ ID NO: 2931 - DNA, 392 bp, Homo sapiens
  misc_feature (1)...(392): n = A,T,C or G
gcgcacctttgacccaatggggcttaactggtnacaaaatgtccttctatgcatgagatctacannactatatgttcttcaagaactgatcagcggntttcaccttctggaagaacactagaancatacntatggggccaaaactcctnattctcngactgtggcgatttggacatacattnngtgtggagganaaatntncacgctgaggtcactcatngtnnanagacatgtnanngtangaacatggaccattctaatagngaaanggatngatanacatctggacaantaaaaccatggngcanaggaatncacacgtgcncgagaccatgtggcncttcaacatnctntggggttntnatggngngacccaacttgagggttggcaa

SEQ ID NO: 2932 - DNA, 392 bp, Homo sapiens
agccggccggccatctgtatgttctctaacatggacatctgttcctgatatgtatacgcagggccagtttgatgccccactctccaaaccgaaagccctgttctttctttctcttgactgatagccactgccagggtttctaccactgcggccaacagaaaagtgttctatgccaataaatagtctcccacgcatggaaacagagagccctggcttctgcctgccctcagagtgagcagccgtcacacctgtccagccttgtgttttctgagggctgtagcagtatgctatggccccaggtctcggtttcattgcggtgaatggaatggagaagacatcttgccagccagaacacattaaaggttcaccgcagatgcccccaaaaaaaaaaa

SEQ ID NO: 2933 - DNA, 392 bp, Homo sapiens
  misc_feature (1)...(392): n = A,T,C or G
gtttgacataacagtntaccctacctncntgctggggctgtcagncatgnacaattcagtagcattagcccatccaggaacaacttcaactctaaaagnacacttaggttcaaggcttgctttggagacaaatcactgaggtccatggcaggtatagagtggagttcaaatctgctctttgagaagagaagcccagaaganagtggattcttgaagccccatggagggctagctacattntacctggagacaagataatctgaggggcgaanccagtgatgcanagcaccaagactnagaagatgaatattgggcctgctttggcgagacatggttcagactcagaaggaggatgtaacgataataaagagaagatatgatgataaaaaaaa

SEQ ID NO: 2934 - DNA, 386 bp, Homo sapiens
  misc_feature (1)...(386): n = A,T,C or G
acccccctgtgtgaccagggcccaacccagtacctctgatggcagtgctggagggatgtgtgtggcagtcctcagtcccactcccgcttctgaggtgtcatctgcagcagacttcccggntaccgntctccctgtgcacgtggctccttgggtcatggtaaaagggtggaagatgtgggaatccctnatgaggacccaggaactcatcagccttctggggntcccanggaagctgctntagtatccctcancatggtgccaaccccttttggttncaactctaccacctgncaacagctgncagcttccttgatgagatgctcataagaacgaaaagactgntaaatatgcntnatatgcaaatatcgnggataatataaaaaccc

SEQ ID NO: 2935 - DNA, 386 bp, Homo sapiens
  misc_feature (1)...(386): n = A,T,C or G
tccgctggaactatgggtaaggccagtcctcccaactcacctctcggganggatgaggacaaggcctatcctacctggtaacccagccatggccagccaggctgccaactacttcagcactggtagcagcaagccagcacactcctttttgncattttnntangntgctagacatcaaattngccacttgnaactaanngacaagggnnnggggagatcccccaagagcaagagaagcagntggntgctntcatnccttatggngaccaaaggctgaagcccanacncacgaagctntttgtgttcctgtnnggtggncatctgcctgctgattttctncctnaacatctttttgctgnatcnccgggcnattggtgtgcgttctg

SEQ ID NO: 2936 - DNA, 383 bp, Homo sapiens
gactgaggagaatatgaaattatatttctaaacaagcaaacaattcactttctatcttattgtggatagttaataacatcttctctctggatcaacctaagaatgtcttctgtctggatcaacctaagaagtgggcagttttaaatagaggctgaggctgaagaaactgggagccagagcacaggcaggtggcaacctacatctgcaagtgactatgaagagcctggaagacatttttggctgatgttggagtctgctctacagttggtaggggtgccgtaacaccaatccaagatttagacaatgagagagaagactgctctaaaagttttctaggctatgtcaaactcaaatagaactttatttcctcccaaaaaaaaaaa

SEQ ID NO: 2937 - DNA, 383 bp, Homo sapiens
  misc_feature (1)...(383): n = A,T,C or G
ggtgggaagaaaaagcagcgggggaaggtgcaagaaaaaaacccacaaaccatccaannactggctataggnaaccacaaatgaaagcaatcgagcaagctggaagcaagttgaatagaaggaattctctctgggatcttcaagctgttctctaatagtgnttccactatgaacgtggagctcactgattggctaggcaggctggccaatgagcttcagggatctatctgtcaaccttttacccaaagcgctgggaagatcgaagctctcaatgggttttgaagtcggtcccggggaatgaactttcctgtcttgggggatgagtgccatcaggcaatttaccaactgngncagctccttcagtcattattaaatgtgagaaa

SEQ ID NO: 2938 - DNA, 383 bp, Homo sapiens
  misc_feature (1)...(383): n = A,T,C or G
caatgcaagtcatcacaaactaagggtcccatttcaacaaccttctcacaatcctaaggctcttcccttcctctcacaccagacaaattttcaatttaactgcacaactcaatgactttcagaaccaattctaatagtaaaattgtcatatactgcaaattttaaccaaataactaaaaaaatgaaacttttagacacccaaaatagtgaacccaaaacttatattatctccatctgcttgagtatagaaattatggccaagatctggaacttgtaacagcagcagacaagacaacacagaagaacagaacaaactgctccatcactattaangactnncatgcnatattaaagttaaacaatgcttcacacggtgacaaaaa

SEQ ID NO: 2939 - DNA, 382 bp, Homo sapiens
  misc_feature (1)...(382): n = A,T,C or G
aactgagacacacagtaacagacgtcactggctctgtgaaattgatgctgtatcctggaaaccctggtgtctgggtggctgagacagagtatcctaagtttaaagccactttggaatatatagcaagaccctgtctcaatcaaacaaaaagntgaggnntgcctgatgcnnnccaggtctggatgacntncagcnccggcctncnanatgcctaggattanctcgggccgttagaatgnnngnangangaatatgggtgcnccttttgnaatnncttgatgtttcctgaaatanggtnncctttaancctggctgacctccanctcgttctctagcccnggctttacttgaacttgaaaccatccagatcctcccacttcca

SEQ ID NO: 2940 - DNA, 381 bp, Homo sapiens
  misc_feature (1)...(381): n = A,T,C or G
agtggggtctttgcagaaggantccctcgnggcgttccggnacgnctccagtgtagggtctccacanagggtgacgctggnatgcacatggccaggtccgtctcagcangcactttgggcacccggtgtgtcggttcaaaggacaaggagagctggccacagcgatccccagnatccctggaaccgaantctgggngggggggntgntttattgtctgctntaatgnaccgntgcacgtnatttttgntactgcgtgtncttttgnngggcannngntgntgaatttacagaaatgtgctnggaacaggcagcaaggcatnctgtatttccncttctcatcgtgctnatgggaaggaaagngaatatccccatgtttagta

SEQ ID NO: 2941 - DNA, 380 bp, Homo sapiens
  misc_feature (1)...(380): n = A,T,C or G
tcctgacaaaaagggcacgcatcgagtgcncgatccgtgaggtggagnttatgcccaacactgtgtncagggnncnagtactgnntgggnaggccngtcctgggtggagcccnagaacntttcagtctgcggccagggacagagaccagaggaggacttcatgaagctgtgggatttgaagagggacagaggagcnctnnngccnngaaatgttattgttgtggagccgnncancctgatgtcatcatcctattgtntggagaccgacgagccngagcaggtngcaanccatgcttgctgnanccgctnntcaggtnanctaacatcaannanaggttgtcccacatctctntccntgattttntgtaacacggtatata

SEQ ID NO: 2942 - DNA, 379 bp, Homo sapiens
  misc_feature (1)...(379): n = A,T,C or G
acagctacagagcgcgtnatgtatcccacttncaanatcngcgtncaatgtgatcatcgtnangngaangatgcnanggntgcccnangntctnaggntatnagcatattacttcttnccgagcgtgacgnncggtcacgatccactctgctcatgagcactgnangcntcncctcaacggagaccatctgagtctgnanacanactacaactgggtgtgtgttcttcacacccnanacagaagnaattacgattgcctaactcctatagccactgagaagagganacatncntantatgaactagaaagnatagatattctatggcataacngattcccccacttggaatattaagagagaaaaagagcagggactgt

SEQ ID NO: 2943 - DNA, 379 bp, Homo sapiens
cagtgcttttacggggttcactggaactggagaactgtatgcaacgctgtgggctgagcgtgggcaaggaaagctccggtgacctccggaatccactcggggccagctcttcacaggactcacatccatggtttaagaagagaacacacaatacccacgcctacttcctgcaagtaaaaagaggcgagttttcccagaccactccaggcttaatctcatgtgtacaatcccagcatgcaccataggagggacggcaaacattctcagccccggatccttagcttggttgcacttgcgtgctcagcgtggtccctgagattgatcccacttcaggattctaggtttcaaattaaaaccaacccaatttcccgggaaaaaa

SEQ ID NO: 2944 - DNA, 377 bp, Homo sapiens
  misc_feature (1)...(377): n = A,T,C or G
tgagaggagggactcntcagatggcatgaacagtctgcccaatcccgttgcctgtgggcggagaaccagatgcatctctacgctgcttctctccgtctgatgttctaccctggcagtgtgatgaagcaccctgcaactgagtttctttcttcagttttttaaagatgggtataccggcttagtggtaatgtatgtacctaaaaggcctaaggccctgagtttaatcccgagaactgcaaaaagacaattagatctgataaaagcaaaaacacaacaaaaagatgaatctaaattaaatatgcntggtttgaaaagacttncaagatccactgttatatgaaaaaagcatattaaaaaaaatcgtattgtgaaaaata

SEQ ID NO: 2945 - DNA, 374 bp, Homo sapiens
  misc_feature (1)...(374): n = A,T,C or G
acacataccagggtatgtanaaatgtttgaatgggaaaaatatnanagggcaagacntgactggctttcagcactgcaatgaataggaanancaaatataggtaaaaagacatgactgctcctangnntggncgttagaantatatatngntctangccnacngaannncagtttcncgcttantcaacacttataatgccccctnttgggatnantctncccaatcctaagtacttcatnntttgtcncgccgngtttcgttggactgggaatttataaacttttcatgccatnctacngatggnggaagaaatnaatggtaactgatagtcaacctttgacagggctctgatagacccacccacggattttg

SEQ ID NO: 2946 - DNA, 372 bp, Homo sapiens
  misc_feature (1)...(372): n = A,T,C or G
gaactgagactgaagacgtgtaaatgacccagtgcattgctgggagtgccaacaggcggaagtggtggtgacatcatgcgcccatccggctccgagccttccagcagcctgagnccaaatnacagagnnactggaacctccnccagcaanccnacaccgagnnaagangancctggtncttgccanngnnggggctgngntgacagcttgnagcncntncttnctnacgtcccntctctgtgatgcttcccccnccacacacacacactccaacccccaccaccccaatcgcatccctgaacagcattcaccagcaaacgtgagattgctgcttctcatataacacatgagctgnggtgtgaaaaaaaaaaa

SEQ ID NO: 2947 - DNA, 371 bp, Homo sapiens
  misc_feature (1)...(371): n = A,T,C or G
tgggagctgcttgggngtggtaactagggactantaggaanactgcctggtagtactcncagaatngatccccacnttaanccttggggaaattttnantcaacagagcagtggcagaaactgcattacnagaagacttgggaaactccaaggtcacagaagctactaggctagtggacggacngacantgaaccatgattgaaaccccttactctgctgctcataagaacactgatcttcaaatnctattgngcatttgtaactgngttggtanattgctgactatgtnaatgtgacttatcctgattttntttttattcatcctattgntgcctggatacttacataataatttctgagaaaaaaaaaa

SEQ ID NO: 2948 - DNA, 371 bp, Homo sapiens
  misc_feature (1)...(371): n = A,T,C or G
ccttcctgtgcaaagtgtggcatcatggaaggagagatgnntgcaggnaccccagcctccggnttgcctgtgcagccatcatcacattccttgtcgtaggatgggatgagcncacactggnantaaccancgctggatntgctgggcttcaaagcaaagctnactcttncctnggaatncnggaagtannactnatactccctgcctggggggggggngcattgatgaanccacngatnacntccccactgtcgcaacaaaagaacagaangttattttnctgcgccccaatcacntcccacaaaaaaacagggcctgggagttgnatntggcgtctgaatatngncttgtaaaaacaatttaataaaagt

SEQ ID NO: 2949 - DNA, 367 bp, Homo sapiens
  misc_feature (1)...(367): n = A,T,C or G
atgagacccagcgtttgctgcagaccagttctgcattaagcagaccagatagacacnccgttttttatgtggcattgtgnccccaggattcccctttgaggaggnctttaaacttnacncttcttcagaagaancccaatgnagacctaagncgttcatgccaaaattancatcctaatganacaagttggaagaanatgttagatattttgaagaatagtggccccagcactgcagaatccnacagttgtgnttcaatccaggctttgtaagtgncctaatccagatgatcattncaaatgatgtnccgagcaatggagccaannancccaancatagaacagngagagatggctaggctatatgc

SEQ ID NO: 2950 - DNA, 367 bp, Homo sapiens
tcagggcagctgcgactacacagaggaatcctgactcagacaacaacaacaacaaaagatggcttataagcaggatcagctcatctaaagcatcctaacttcccaagcacactatgatctcaccaactgaaatcctacccaaagcaccccaagaggcaccctgagatctaatctcaattccttagcaagtctttgaggatacaacttcagaacccaccaaaatggtatatatggctattgtaaatacaatagtgtgattctctaaccttctttctcctatctccctattaacacccccctcccccttgcttaagcctatgctaagatctccttttaataaactccaactttgcttcaaaaaaaaaaa

SEQ ID NO: 2951 - DNA, 367 bp, Homo sapiens
  misc_feature (1)...(367): n = A,T,C or G
cagtctactctaccacacatgactganccanatccanccgggacccaacangtatcaaagttgtgtgccagaatgcccaggangtaaggntanngnaaanagctactctatnctcnccnngtatgngtncctnngggatatgccacaccnaaaangtggtgatatctacatccaaggcatcnnttnaggtttttgntgatacaatnancccagtttcanaaacttcaancattttggagatgggatcatcatgggacgactgccaaggacagcngccatagtagaggagcaatccagngngcaatactcntncatgggctcagttcctgccttcanatttttgccttgagttcctaccctgacttac

SEQ ID NO: 2952 - DNA, 364 bp, Homo sapiens
  misc_feature (1)...(364): n = A,T,C or G
gaagcgcctagcgccagtgtnaaaaacgnctacccttcggtctagtagggncncgcgctngactngtnttcccctagtngcgagctacccatgtggnaagtacngtctcgccacagnctcggaagtaagacttgcactctgtgnctngcactagtttatcttactacagngtatngatggttccgacctacaggtacgaggctctcctagctctctcgctttcctgacnctgcttagaggttccatgtcactggacttgcctactaggtcgatcgaagcaggcaatcgtngcgaatgtcgtaacgccagagactaaaccctgttatgcgctctcgccaacagaacagacagagacatagagaca

SEQ ID NO: 2953 - DNA, 363 bp, Homo sapiens
  misc_feature (1)...(363): n = A,T,C or G
tgattgttctgcagagctcctccataaaacctagctggctggtggtnagcctctcagttcagaagatnctttgggagcatgcaccaacccagctttaccaaactcctgaaaatgttcatggattnaaagctggaaggaccttgtgcacattccttgggnagctacaagtcaaaaatgacagggctggtggngatttatcttananccnatccngantgganngaacgttganangtcatnancattataaaanntnggacanaanaantgtntgctannccaancatnncctnattcanacattgatntaagttgnctacangttgaaagatatcatcnnacggcatcaggggcattactgat

SEQ ID NO: 2954 - DNA, 359 bp, Homo sapiens
  misc_feature (1)...(359): n = A,T,C or G
tctgaagtgcctgaacgtaggaatgggccttgaacaggaggggaccattcggangggncnccacctcgcgacggncgcgccaggcaaagagccancagccctgcactccacactggccaggaaaagccttccacgaggagcggtcagactgcaaaatccaatgtgcttccttccccgccacgggcctctctctctctcggggagccgatggtccccgnccctgaaccccctaggcngcatncccaccacagaatctaagacctttnatctggccgagccagggacaaaggggatcctaagcaaatgccctccgnggacaacaggccccacgggctaaagggntcccagggcaaactttc

SEQ ID NO: 2955 - DNA, 357 bp, Homo sapiens
  misc_feature (1)...(357): n = A,T,C or G
tgacacgcatgttttggaatttgtcttactctcatccccatagacacgatcnagagagagatatgtgcactgaggnntatggtgngaggntgtctcagnagtgnnanacagacccgaagnctattaattntgttaaacagaatgctgaagattncgcttatnatttaaagacccctaagantggatnnaagatcaatcaagntccaantatcttgtnagttgntacatntgatgctccagataatgtagctgggggagaatangtcttggtatgaattgatncttctctaatgagtccccttgacccactctggcagttcttanaaggtgntagntctatagcagaaccagacaggg

SEQ ID NO: 2956 - DNA, 357 bp, Homo sapiens
  misc_feature (1)...(357): n = A,T,C or G
ctctctttggagatgncccctnagccctggnggcaaggaagatgcaggtacctgatgtngagccggncatgcatcnnaacanacacnttattgccagcactttgaccangnttgcctctcagcattgactatgcanaaagaagngnctntggccaggncgtanatgancagctgagcgnnanacnatcttntggaaatgactcgcctgcaattcaggaagaagcgccttggaagctgggaggagggttcatgataggatagggttacagaaaaggccatccctggcttctggctggttgcccccataagaaaacagtgtctggaccttcccctacagtaacttcactttctcagagc

SEQ ID NO: 2957 - DNA, 357 bp, Homo sapiens
  misc_feature (1)...(357): n = A,T,C or G
tagcgactgctccgggccntactacnttcttcttgncacnntnctntnnttncttaagagaaaccangcanctgcaggngcttnactnnatgctcagcactggatnaanactttctctagtcctatgttggggaattgntaaaggangncataaganntgaggccaaatgaaaagagcccatttattnacgtgcnggacttacattgaacanagtaaacaaaggaaggaggggcgtgngcgacaaaggaatgaagccctctataatgcagaagagctgagtaaggccttccagctgtncaaagaaaaagtggctgaaaaactggaaaaggttcaagatgaagaagaaatattagaga

SEQ ID NO: 2958 - DNA, 352 bp, Homo sapiens
  misc_feature (1)...(352): n = A,T,C or G
ttacttcttgtggaactctcaaggtgcggacaggcangnannnctttaaaanganaaatttannaggcttnccancgctggactgcaagaccagnanccctgcagatantcttncnngncttnggnaccnnattgngnncantgatacatnacngccttgaggactaagcnactactggattcttggcccttgagacanngagagatggccgttgttggaatacctgtatgcatatgnctgaaagccaatctataaatcctcttttaatatatttattcattctatctgtttctttaaagaaccttgactagtgtgtttattaaaatgacatcccattctcaaaaaaaaaaa

SEQ ID NO: 2959 - DNA, 352 bp, Homo sapiens
  misc_feature (1)...(352): n = A,T,C or G
tgcttctgctgacatnncctgttactcagactcagnctccctcttnaacatggangaactgnagngattacattgnacctgactanacnntntacaaccatttattttttttagctgangactcttaagtcatccctgcatgntatgtgnntgccatcaaggtgnctgncaaatagcatgtccagggactaagacaaagacatcnttanaagctacgtaccacagngctncatgccttctctangattgagtgcncaccannccatganacaataaangcatccatganactgctgacaaagttngaaatatacgtganctcanatacacagggaggaaaacgctgatgtgc

SEQ ID NO: 2960 - DNA, 347 bp, Homo sapiens
  misc_feature (1)...(347): n = A,T,C or G
aaagtagaagggtaaaggactgacgccaggggctanagnagaccacgtctacttccagtgcgctgagaaactcctgggaactcgtttgggcctgaacccacacgcccgccgcaggtcgcagaggacatcctcggaccttgggcgcatggncccggcacagnctctcttcgtgaggaccccagagccctagaagggagaatgggacattgtatgtcgcgcccaggagtctgattgcaaacgaacgccctctccaccccaccctaggcggcaccacccgcgtcgcccctctgctgcgcgtgaccccaagggcttgggcgattgtgtctccctgagtacagttacaattg

SEQ ID NO: 2961 - DNA, 344 bp, Homo sapiens
  misc_feature (1)...(344): n = A,T,C or G
tgaggctctctcttcagggatgacatcatcggctcacaccagtcttccaggaccaccttctggatgccaaggctgctgctcgagtacctgctgtgcacctctacctcctgngncnnnnancactnnntcaaggancctnctngnannnngnnctanttacntgtgnaccccattggnaatncgncacccgagggacacattnacacattaggatacatcattaggccnnttantttntatggggnggaaaccttgaaccagtgccctagtgagggggcactggncatggcccttgacctttgcatctgcttgtgtcttgagtctgagccctttcctgtacatct

SEQ ID NO: 2962 - DNA, 344 bp, Homo sapiens
  misc_feature (1)...(344): n = A,T,C or G
agacgtgaggccagccttcatgggaccttgcagaaccatgagctctttgggtagattggtgcttcctgagaacccgcagcagcacaccaggattgcacagggatgcctcggtctccagagcgaacagcagccactcagccaggaaggggcagcacnggctggtgagctgcagcatgggcctccttcctactatgaggtccccactgaagatgagccaggaaaggacagaaggtcctgacatgacctctgactgtcaccacctcttgcttgcaangaagaccctgggtctgggcatntgccccttctctgtccctgngcctnctctatttcttcagggtctttgc

SEQ ID NO: 2963 - DNA, 344 bp, Homo sapiens
  misc_feature (1)...(344): n = A,T,C or G
agactttcactaggcacagcnagtggtaactgctaaaaaacacacgtgccctgcatgttcccacccccaantgacagggaggnagtatagctgctgtgggtagcttcttaccttccctgggaatagcctnctgggaatagcctctatagttccctggtaatagcctgctgcaagacactttctaacnnnggggggtngttngcatgccaagggtatcttcatatcagaaggacaaggccagggaacaggagaactcaaaacctgaaaacctggtccaaagnctgcttatttctgnatacctgggnaacatggctgccacagangaaagacgttcatccttacaa

SEQ ID NO: 2964 - DNA, 340 bp, Homo sapiens
  misc_feature (1)...(340): n = A,T,C or G
gattcatttggagaccacctagacagaactggaagccagccncttagngtanttgcccaccgncacaaaagcatccctggaccaggnnaaanaagccctttgtgncctnattcaccacaacctggncctgtatcatgnncacaagcgcgggagaggnggagtatgnancccagcgcatnnggttactgngnatgcttaggtatcnccggtacatctacaccaccaaaacgctgnacggtnacaccgganagctgattgttgangagctnctgntgaatggaanaatgacaatgtnngntgntgtgaagaaagtagccgnccgnctcacagagaccatgga

SEQ ID NO: 2965 - DNA, 337 bp, Homo sapiens
  misc_feature (1)...(337): n = A,T,C or G
cttgctattcctaccactccctacgccctcttggngcttttctctacctttgtcacgtcagcagcatccaagtgttcatactggtcctcctacaagtggagatgacagttaattggaagatgagcaactccctacccagtatctcctctcaaacatttctcatnttgnggctggagcagacggtttggcagctaaaggctcttgtacaaaatccaagttcagttcactttatcttcattgggcagcttaaaaccaactgtaacttcagcccccaacaaagatccaatgctttgctatgtgcataagaataaaactagtaagatttaaaaagaaaaaa

SEQ ID NO: 2966 - DNA, 337 bp, Homo sapiens
  misc_feature (1)...(337): n = A,T,C or G
aggttttacggtctgtgtaaaanaaccgtgcaccanttcttcccattgaacttccagnaaaaggcctcataggtgaggaggcaaagtcacctaaggtggcaccaaggcaagaaaagaacttctctggtgcggagactaaattttaagaaaaaattactgcgacacaatgctgtcatttcagtagaacagcaaaatgaagaaccctgaagcactcttttgaagatgaagaccttacaagaaggcaaagtcatcactcactaaggtccagttgggaaaatgaagatcctgtatgtattctgtaatgactcttagaatatattttatataagaaaaaaaa

SEQ ID NO: 2967 - DNA, 337 bp, Homo sapiens
  misc_feature (1)...(337): n = A,T,C or G
cctgaaccctgtttcctgaaacacagtggcacccattctttgnagttccggtggacagcagttcagaaacagtggccaaataaaactggaacttggcaacaaaaaactttnnaaggaaaattatgtacctgccagaaaccagggaggaggtgngttcctgtttgttcacnagcagnacttnattcaggaaagcatggaatgntaacctacagggatccnagggagcatggccaacctgcaggcaggcagagggtagctgttcacctnccaccctncttnctntcagnggcattggggtcaccatttgtttctgaacaaccttaaatgcactttcctt

SEQ ID NO: 2968 - DNA, 335 bp, Homo sapiens
  misc_feature (1)...(335): n = A,T,C or G
tcctctgtgcctaccttctcttnttcnggaggacaacccnangctagtgcggtagtcgttcaacagcaatgtctgcacacactgtcnnggaanaactntttcttctcacngcnatanttttgtggctatnantaaatgnncgttttcaagaacttnaactaattcatggacaaaaccnntnttgtacccttgnactacaaacctgngttanaaancttaaaaaggggggngnangtcaactgtngtactttatggggttccagcacttgaggcagggaggattgatgtgagtttcaggccatcctanaactacatggattgaggagacactttat

SEQ ID NO: 2969 - DNA, 334 bp, Homo sapiens
  misc_feature (1)...(334): n = A,T,C or G
tggcttgtccggaggtggaaaancaacggannaccttnctgccaatnctggaacttcagctttgagaacgtggtncaggnangggaccaaaagnnaactgctgtgcttgttcccaccccgnaacacatacagncanacatnnacctnatttcgcttcttnctggggtgacaaaatatantagaaaagccaagcanaaaacacagggaggaagcctgnggttttccacctggagggattctccaatgcncaacgnagttcaggggccctnacaaatggcatnantcatatgtttccnacttgnanggaaatacagtgcagggatttcaacttgca

SEQ ID NO: 2970 - DNA, 332 bp, Homo sapiens
  misc_feature (1)...(332): n = A,T,C or G
ggcgcttttgggttctcccttcaccggntattagagccccggctcancattgctggagagtggtgaagaggcttcctagagctnncnccancntacncagncnggctcaggnnntttcctactttttccttangcttttaaaacggcanactatgaaatngccagcctaaaatcttttgggggtagtaaaatttnattnaaaagcanataagggctagccgagatnnctcacatgntnagaacacccgactgctnntccaaagggccagagtngaaatcccggcaccccnngggggnctnacaacanccngcacaagatttgattccctttt

SEQ ID NO: 2971 - DNA, 331 bp, Homo sapiens
  misc_feature (1)...(331): n = A,T,C or G
gaactgaggtgaagaaaatgaggacacccctccccccacaagtaagagatggagttcttgaaggtcaaacagtgactatgtcacggttagaatcaggactcaaggcaggctgaccaccctgaacaccacagcacagaaggtttttttaggctaagtttgtatttacatcggtgcgtagcatggaaagaagtaagttggaattgtgcggctttgcttgagcctatagccttgtgatttttccacccagcctctttgttccctgaaatataatgnctctgtgacttcttatataagagtaaatgcctacaccagtaactttgaaaaaaaaaaa

SEQ ID NO: 2972 - DNA, 331 bp, Homo sapiens
  misc_feature (1)...(331): n = A,T,C or G
agatccagggccttcagaactggcnccatgcaccacatctaccaggnaaaaccagctaaacntctcccactgganatntagaggggcctccagcagntggacctcacagaggagcnactccnntcagncctgntgcctggagagancgatatgggatatgaaggaaaggcttcctggatgagaacgggtgtgttacaaaccagcccaattctgcnanccaggcaaggtncttctgccatntgggagcatnnggacgacagcagnncaaactacgtgntcatattggntaaaagacacggtgggtgccntctttntgtgggtcccctcccag

SEQ ID NO: 2973 - DNA, 331 bp, Homo sapiens
  misc_feature (1)...(331): n = A,T,C or G
agaggctcctctccggtgtcatggcaagccaaacttgccacttgaantgcanccagggttcaagtcacangcccaaagatgatcattngaagcanaagcctttgcctaaggccttaggaagcctntacatctgagcttgcagagacattatccagctaacctccagcagtgggaattttcttccatggcttntttgatgaatgaagagcactctgttcacattccctgagtgatgggaggctcaccacctcaaagtagcttgcttctgttgaggcgtttatgatacctgattacctccagtctccattattgaagaaaaaagaagatagac

SEQ ID NO: 2974 - DNA, 330 bp, Homo sapiens
  misc_feature (1)...(330): n = A,T,C or G
ctatgatatcctgcaggagcactngtggccnttgggaaattgacctctggatttttgtcangcnttnctcttgatcacgcgtctntctgcantaaagcagnacnattattcnncacatacagnancacaaagcgaggacctggctcntgcacttattgactganctgtcacanncaacncancaacggggaggngtgtttacnnctntgatcctcatgctacaaccacaactgaagtatcatanctagactattcctcatatccacgcagattcagatttgtcatctgtttacacttttagaattaaaaaatcccacaatatataaaggc

SEQ ID NO: 2975 - DNA, 329 bp, Homo sapiens
  misc_feature (1)...(329): n = A,T,C or G
cacggaatcttcatctgagccattgggaccctggatgccctgcnagnaanttntgnagaccttnctcctttcctgcctccgtttgccagcttgangncagncnangcagggacaaggctccaagcaacannctcatgcccttcagctgngcgttatgacaaggggacatgctcccactccaggnggaggcttgctgagtatcagtcagaaaccgtccctgacaccgtgtcaggaatagcttattcgtggttcgtcttncttctttggcattcaaactgtgtatggagcaattagcatttaatattcngtaattagcatgcttaatgtga

SEQ ID NO: 2976 - DNA, 328 bp, Homo sapiens
  misc_feature (1)...(328): n = A,T,C or G
agaagatggatacaattatcaaagancccggncgcgagggcactacncgncacangccttatncncttanngggngccatcgaagacgtggaatacagaaagcagnangccctgttntgtcctgcagcnnggagacancatcgatggctacantgcncaatataaagaatcagaanngtctctagaactgtgtnatgaacacatttcagacgcntaaagttccagntccaccgagacngtgggggnaccatnacgttntatagctncagnagagactacttagcaagctctaaactgaacagnnagtnttctagaagaccgagattgc

SEQ ID NO: 2977 - DNA, 327 bp, Homo sapiens
  misc_feature (1)...(327): n = A,T,C or G
actgaggacttccttaattctaggaccttggtccatnactcttcttcatcaatccttcttggccaatcaccttgtagaacttntccaaacagcgtggcggctacttcccatcttctcaaggggctttgtccatcctgcatcatctgcatactgcctcacagatcaaaacactgaacacagcagctgagtgggggcctcattaactgtggggcagcgggaactttagatgaagccacgtcaagtccattgctttcttacaggtatttgttaatggntcataaacttacaaaaacatgcgcattaaagatgacccgaaacacaaaaaaa

SEQ ID NO: 2978 - DNA, 327 bp, Homo sapiens
  misc_feature (1)...(327): n = A,T,C or G
gactgaggcatcccgagacaggcgtctacattcattctctccacgngctcacttccaatttactatcgctctgnagcagtctagctcctgcagctgaaatcatggctgccaaatgtgacagcggtggcctgctctgcctcttgtccctgcccttcctgcttcaggnntacanggnannancncacnatntnnnggantaccangtaatatgcttattganctcacatatgantaaacantggaanatttagcaagcnatncgnaanncnaanagtnatnggattgctntcacatctaactaaacacgttgacatttaaaaaaaaaaa

SEQ ID NO: 2979 - DNA, 326 bp, Homo sapiens
  misc_feature (1)...(326): n = A,T,C or G
actgagtttgtccagagtgcccggagactgagaagcatggccgtcatggatgtcagcaccgtgtttaaggagttggtntttcttttntgcgtctgtgatcttgccctantgcccactggatccctaaggnctacgncccataatgtcgcntcacatgaggcaaattcaggacacctgnggctgcaggacacntgangctncngngngcaccangcangtggggcctagaatgcacacaangcaccattaaatnnaatantcactatggagattgcctgttnctcaaaaatgtacatactgaaatctggtccccaaaataaataaaa

SEQ ID NO: 2980 - DNA, 325 bp, Homo sapiens
  misc_feature (1)...(325): n = A,T,C or G
gccattggacgacgggaataagcantacggcacatntttnacttcgcntnttgccccaacggngaacacattatggnnggnaagnctatggagttntggaaaaaagnacatggtctcagggggacttacaaattttaagaatggggcccggtacaccgggagnactatgtcaaaaataaaaaggcacggccaagggcaccttttattcttattccagnatgggattccagntatgaagcctgtgggccctggnaaagtgacgtatttgatattgggatgcgaacagcacgggtggaatatcgtccttcacaggataccggaaagt

SEQ ID NO: 2981 - DNA, 325 bp, Homo sapiens
  misc_feature (1)...(325): n = A,T,C or G
ggtggttcccacgcgtgcacacagcagtgcccaacatgctgggaagcagnattctcagctcanccgaacatctggcancgctaatagcangcagctgccagtgggcccggtatgctgggttctggaagggtgtggaaagtgaaaagacttccctgtcaggacactcaacgtccttggcttcatgaccctnaaccaanaaaaccnngtttgcgagatataaatggtatccggccctttatgcancccatgcctgtgccaccagtgnanccccagggaacagaatccccagtacttgtaggaaagggtgaaaaggccccgcttgccg

SEQ ID NO: 2982 - DNA, 325 bp, Homo sapiens
  misc_feature (1)...(325): n = A,T,C or G
gaggtctcagaggagagtaaagaacacattgcttagcttggattcgatcaactgctcgtacagcacatcgctaatcttcattgtgtacctcaaagcngttccgtcatggcctctgactgctcttctgatcctgctctggactgccaagggagtctgagagcctaaatggaaggcctaccagtgtctctttggaataccttcttccctgccagggcatctcttcaaggaatgtggacaaaggctgtgactcctcaagcagatgtctcaatgggntacgtcacgggtgaagcaagaggccaagggcccccctttagggatgaggagg

SEQ ID NO: 2983 - DNA, 324 bp, Homo sapiens
  misc_feature (1)...(324): n = A,T,C or G
tgaggtgtctcatgctgggagnggggaaggagctgnaacctgntgccagccagagaaggaacctgtcttccaggaaangatttnacgatgncctgacnacttgttagatcgtctnacgganagactggagctaagactgactgagtggaagcactaccatgaccaggattacatatctctgacatgctgtnnaaagcaaaacctcatttcaggaccctgaacatagacagacttnaagaggntattggatccctttgnctntnttcccaangngaccaccttgaacanatctnggnttnctgcatntcttaatgactcatctct

SEQ ID NO: 2984 - DNA, 323 bp, Homo sapiens
  misc_feature (1)...(323): n = A,T,C or G
atgagagaccgactaataggctttaagcaagactacagtnaaatatgtntgtgctgtnttcanataaacatcttgctatnttgtntgcgtatcgnccttataccacttgagtgnttggncgaagaccagatctttcttgganataaaaggggatgaagatgganctgccggtnttgtnacaancctagatgttagttactgatnatggancaggttttaatgctctaagacaccaagccgcgattcagctntgcatcctcagatntgntganatctgtgggggatctcaganatntgatatggttctcataccttcagttatc

SEQ ID NO: 2985 - DNA, 323 bp, Homo sapiens
gcccagtaccagcagaagcagagtttgaagaggaaagccccatctcagctggacaaagactactgaccacccagcctctgcatctagagacaaaagtctgcttcaggtgatacaagagaaaatgggaggggtgtgtgtgctatctggtgctccccaagtcactcagcagcagcctggccgtatacaccccagttcccacttcccacttctcactctatcccagcggttcatccttggctataatagcaaattcaaaactagtgtgggctataggagaccctgtctaaaaacaaggtgaaacaaaaatcatttaaaaaaaaaaa

SEQ ID NO: 2986 - DNA, 322 bp, Homo sapiens
  misc_feature (1)...(322): n = A,T,C or G
gaactgagaaagaatttaccaaagcaacaggaaggtatccaggaaagatctgccctctacagtctacagagtcattttcaaacattttctagattgccatgtttatggtgttnggtgaagtatttatatatagatttgtgtttacttttcaaataaaaggcttaatttttnnnttttttggnangnggcnggaaaangacngggtgntcatgggnnanggcacccccatgnaagatgtgctccatacngttagccgtacaanagctaaggaaaagngggaagatagcacccatcgnangtcctggctgggatggcacctcgg

SEQ ID NO: 2987 - DNA, 321 bp, Homo sapiens
  misc_feature (1)...(321): n = A,T,C or G
gatatagtctgctgtcgggaaatnnagcanaccccctnccccttcctgtnatagacctgggagtngcaacaactanaanacagagccttagatncagaacaaaangntgnactaaaacactaagggacnntgtcacgcaggagngaccaatcaggaacaccacngagtncttgaagaatcgaanatgcagtngaagacnacgaaaccanaccgagcaaacaataaacangttacctcntctaggcaangcnccagcncccaancacttctgtaccngtaggaagttcnctctntcttagtaacctgcctttctcaaaaaca

SEQ ID NO: 2988 - DNA, 321 bp, Homo sapiens
  misc_feature (1)...(321): n = A,T,C or G
ccatggctgctggaagccttntctgantacacttagactctngnnngaccccntggtctgctctngtgggcaatgnagcatgtttgtggtnattnccatntgncaggtgttgctctggaaacagacnantgantagnacctatgtgtgcctgtgtgaaacatgaggggaaatgggtctcntttctaagcccaaacatacctcttgccccagaactgaccnntgnccacatctgngangataactaacagagagatncaaactgaagtaggccagccaggtaaataggagacccttcaatctttagaggaaaaagaaaagaa

SEQ ID NO: 2989 - DNA, 319 bp, Homo sapiens
  misc_feature (1)...(319): n = A,T,C or G
gaacactggacctttnaaacactttccgtgggtggtntttcgggggntcaacaaaatacctacgcattcntgggaattccaaagggagcccatcgnaggcaggttcttgccaaggngnatttccttcctngnggagtggaaagccatngacagtgctatgnangatattgataatnttgctcatncccannaccaatttagcaaanggtcacagggccantcggggactgttanacncaatacaacatccataatnaaagccangactgnnaaggagttcanncgggntggctngcannngcacaatacttttactcca

SEQ ID NO: 2990 - DNA, 318 bp, Homo sapiens
  misc_feature (1)...(318): n = A,T,C or G
accaggacaaatgtggtacctgaaggtacagtgagttcagagaattcacaggggaaatcatcactcagggacttcaggcagnaaaactagccagtcagcctctgggatagacaaggctcaacagttcagagaaccaggccatcgcaaatagttcacagacctgcaagggaagacatgcagatccctgccccccaccccacccctcccccagccccacccaaacatagggagaaaaggcagtgtgggggagggggaggtgctgtgagagaatttagatagctcgaanaaataaatagctggagacttcaaaaaaaaaaa

SEQ ID NO: 2991 - DNA, 318 bp, Homo sapiens
  misc_feature (1)...(318): n = A,T,C or G
gtgctcagaacctggatggagncacncaacgaannctntttgcnaatggganacagcacaatctntntttgaggagccantcaggactccncacttcccntcttgncttgnntaancctncatgtccagcagaccaatgaattattttgcagtcctttgcnttcnngaatgcactantagtaaantagggaggnagcgtnggacagtatggacantntctggacacaatgacagcaacgcttaccacggcnagacttatncagagncacagantaaaatgggttcataaaagcnagggtagtatgttcccataaaaaa

SEQ ID NO: 2992 - DNA, 316 bp, Homo sapiens
gactgaggcttctacatggccagcaagcctctgggcattctcctgcctccacctcctgtctcacttcaggagcactgggattgcagatgcaccagctcgaagtggtttctggagatggaaccctttaccctttcacagccagtgaatgaccacctcagcctgagccgcttaaaagttgtgagagatgaatgccagcacctcagatttcaaagcaacatcttttaaactattgaaaataaccgttactgtaatgatatggcctatataatagatttgtaaagtttcagtactggtttactaacccaagaaaaaaaaa

SEQ ID NO: 2993 - DNA, 316 bp, Homo sapiens
  misc_feature (1)...(316): n = A,T,C or G
ttacagacttcgtcctgntncgccattgctctgttgcatggnnagggaaggntgngccctnatagagtgantagctncttgcgggagcaggtaaggctcattgctcangtgcaccagcttgagacccggntcaaacaacaacaaaccatgattgcncatctcttgcntgagaaggaagtccantttctggataaangatcggagaacagggggggnngaccttgnaggcaanaggcngtatgcaaattgntcaaagattnacaatgacgganttaangcacgantggggttttncaaantcaaaccttttaaagag

SEQ ID NO: 2994 - DNA, 315 bp, Homo sapiens
  misc_feature (1)...(315): n = A,T,C or G
gcgccataattacttcttncggaactctcanaggccncacagnaaccatggcgtggttccatanttgcatatngntanaaaaagaaggtnagaaggatgtgagatcatnctncagagtgattcncgagtgcccatgnaaattgtcctggtatttaacaatcatgaacntgtcaaacatgagtattgnggtagtgtggaacccacaaaaaatngtgacaattctgattattttctttcatctctaaagaaataatgnctcattttcaaattngatttgacaacctatgattcacaaataaaatgtacatgtatgtg

SEQ ID NO: 2995 - DNA, 315 bp, Homo sapiens
  misc_feature (1)...(315): n = A,T,C or G
ggaccttgttgcctgcttcaccagggnctgatagccctccatagaangaangaaancccggggggntnccnttncnnttngtncaacccgnanagcaccttggangagcactggacnanngaagcacctnaagctngacaacananccatnaagaggagacgatccaagaagaaaagcaagcgggtaacctggggagacatcaagactttaactcacaaagctgaaagcttggggaaacaacaaggacacantaccactgaccccaaaatgatgctgctatgtttaatgactatgctacatgttaattctcagca

SEQ ID NO: 2996 - DNA, 314 bp, Homo sapiens
  misc_feature (1)...(314): n = A,T,C or G
gtgaatttttagaagattcanctttgncttactggccctgggaagaaggcacaacaagaatnagtgtgtgctggtaatcaccacagaaaatattgatcgtgnaagaatggaaggnttgagtaagcagcagncattgccatgaccatgatatnaanagaagcttataatgggcaagctagcantgnattnttgatcctcagtgacacctncaaaacgaatacagctntaatggctcaatttcgaccaaaaaagactnagcccaggacactaaagaagtttgaaatcaatgcntctgtaacagttaaaaaaaaaaa

SEQ ID NO: 2997 - DNA, 313 bp, Homo sapiens
  misc_feature (1)...(313): n = A,T,C or G
tgagacggatggtggatggncncagccagaggancacagatagacttgtcttncagnatnctgctnanatctgcatnaagcagnggtgnagatcaggtntctggctatctnncactttaaccactgttgacagctntctgcnagaatttncactgtnagtannncatactnacaaccatagaggagagnttgttcantgtngacagnaggctcagncacgactgctttgcatnacccccatnataagacgcctccaagacttaaagacttgactagctgtacagacactgagagcctccactatgttcttgag

SEQ ID NO: 2998 - DNA, 312 bp, Homo sapiens
  misc_feature (1)...(312): n = A,T,C or G
ccggttggtcgttcctggacttcctggcagcccgtagccgcacggnacctggnacggtaaactccggagggcaactccttcacttgtacgggaaanctttgcagtgcgagcgagcgatctccgcacatgcgcagtgggtgtctgcggtgcccactagtcgtctaggctgcagcgctgccgttccgtgtgtgttgcatttggtagggacagatggtggagacaggtgggtcccaggttgcactangaagtgtgggagggggcccgcgaggtcgaaaacacaattaaaggaagatgggcatctaaaaaaaaaaa

SEQ ID NO: 2999 - DNA, 312 bp, Homo sapiens
  misc_feature (1)...(312): n = A,T,C or G
ttctgcacacctgacacatgcntcgcagnancaggctccattggnnggagctggccgngagcangannaancccggcgnnaagggaggtatgacttctgnccttantaactgcattgctgacnccngntcaggaataccctgcgnactcacctatanttcctgggacgtccccacctgtagcttgganccccatgctntgagttccaaattcanaccccagaactgtgcacacatgtgctgacggnaaggacaccgggccttagtacagatgacatgcaaattcatgacgtcaacagcactttttttttttt

SEQ ID NO: 3000 - DNA, 308 bp, Homo sapiens
  misc_feature (1)...(308): n = A,T,C or G
aagagacaggaaggacccacagattcccctcaccagccngtgnggcaaatncacaacctccaggttcaaccanatnctttctctgaanagccaagatgatgtcangcacgtgacagcacgagacttcacccagcacttanganacagagaaaggcangnttttgggttcaagactgacctgccgccagcgccancnctgggnggnggngggnggggnaanctggggaataccanggtcttccttcgcacaatccttgnaacaganactgnaaaagaggcgggaataggaaanagaccgtgcggccatg

SEQ ID NO: 3001 - DNA, 306 bp, Homo sapiens
  misc_feature (1)...(306): n = A,T,C or G
cacctgagacacaccgagtgatggacagattacangtcttgcctgtgaacctctctgccacctgcttcggagtcagtacctgataacnaacacaaaattggcanacntcatgattngnattaccangaaaatggtgagaaagnatgaatancnnataccgaaaattttaaaaatccaanntaaagccacactgaatgttntatccnccatcacacagagagaacncaaggccacatggnttcannggtgaattcctcnatcanggaacanagaacactgattgcctgcggaattcttcggaaaata

SEQ ID NO: 3002 - DNA, 302 bp, Homo sapiens
  misc_feature (1)...(302): n = A,T,C or G
gactgagataaaggagaaaagaagcggtaagcagtataatctgngagagtcctgagtgaaggtggccatgtgagaagacaggggagggagagcaagagtgganccgccaatcaagacaggctgcctgggccaanacactggccaagaagccataagctaanaaaatgttgggagaaaagacggctgacccagcaaggaccggacctactctctatggattctccctangctctggccttgggtgagtgtcacaatcagcgncttgtaataaacattacagctctncctctgggagtcagtcc

SEQ ID NO: 3003 - DNA, 300 bp, Homo sapiens
  misc_feature (1)...(300): n = A,T,C or G
ctttttgaaccctgttgttcgtgctttcttnntggtngcagggcaancacccatgggcggttacaaattatatgacaaatccttggcacccagacttgaacacaaagngtgaggagagttcccagggaaagggctctttgaantagnagtcattcaaatggggaggtaacgggnaagctagcagcaccgtgtactttcangcaccctcaccttcacagnatgcctgggcgtgcatgagacnggngggagagacagcgcacaagtcangagtgtcatttcangctagtggaaacccctggc

SEQ ID NO: 3004 - DNA, 298 bp, Homo sapiens
  misc_feature (1)...(298): n = A,T,C or G
ctctctagattcatgctcagccgtnatantctggntgncgcccnngnntctaaccttatcnttcttanngctgacagcctggactcctttttattcttggcaatanactttgacctgtcngtaagactgcacagagggagtctcggangggggaagngacacnttagaagatgtncaaagtctctggaaagattaaaaagagagaaatgacttttacnggagctgttctttgacctncacatgagcatctattttatgcacaccacgtacacatacacatgatgatgacaatgatgac

SEQ ID NO: 3005 - DNA, 297 bp, Homo sapiens
  misc_feature (1)...(297): n = A,T,C or G
gaagacagagatgaacgnngacccagggttgctgccggagtgagcgcgcgggcgctgccagcggtttatatgacttcccggntggaggcgtggccactgnaggcatgcgctttccacccattggtagatgcacaaagggccgagtntcccgcactgagattggctggagatggaaagggcggngctcggagctccggcggccccacgtgggggtnanggntgggaggagcgntgaacgccagcancggcgacagntaaaaaagccagagagctctatagagagagctctagagagaa

SEQ ID NO: 3006 - DNA, 297 bp, Homo sapiens
  misc_feature (1)...(297): n = A,T,C or G
ggggcaagagtacgcncccngagagcagagctatacggagaggcttctggccaggactgaccccagtctctaccccctcaggcatggaagcagancatagcttggggcatgngttcttntntgcttcccccctccttgccncaacntggcctancctgctttggctgtgcttaagaggagcttggcttccagccttccnctaagaaagaaggnctgggaaaaccagggaacagcnnggggntaccacatttccanttctggcagacttgagacncaaagcttaataaagacccccct

SEQ ID NO: 3007 - DNA, 297 bp, Homo sapiens
  misc_feature (1)...(297): n = A,T,C or G
ctgcccacatgactgnacgagatccctgngaaccaggattncggaaaatcttgtacaccacnacctttatgatgcccttccgaaacaggngtcctttggcgacaaantcatggngccatgcggaancccatctccatnaggaagtccgtgaggttctcanacgnggngatgtccacacagatgcgcaccagggcgnggctgggacttgnctcccatttnggnctgtnccaggnatnncatnatnccagggntgcccctgccctgggcatggagngcnggggcccttagggcgaacgg

SEQ ID NO: 3008 - DNA, 294 bp, Homo sapiens
  misc_feature (1)...(294): n = A,T,C or G
actaacacagctgcccgtcttagactngaaggaaccaagatacatggctaacaagccgaacannagcatgggagtttatagagacccctggagatgctgctcaccggtacaggaagcctctcatantacgacttttccaaagcagcnnantgatacctcggtttcaagctnacggccaggcctggagatcaaanctgagccacagnttttggtgtntacttntccctantnaatgggaactnggttattgacacagattcagganttataaagaaatgtaaagaaacataaaaa

SEQ ID NO: 3009 - DNA, 294 bp, Homo sapiens
  misc_feature (1)...(294): n = A,T,C or G
ttcagttcaggatcggnnccctgttaaaanactgttaaaatggattaacagaancattaccaagtcaatggacncccattatntggctttgtggcaatttttatggaacacaggaggatggcagncctgctgcatttanactgctatngtaatggggagnaaaaatttttgggnaaaaggttaagnacnaatggnatggatggacntctcagngnacctgtnctatggttttgccatgcttanaatacangactgtgattccttttcctctcagcacaggattaaaaaaatagg

SEQ ID NO: 3010 - DNA, 292 bp, Homo sapiens
  misc_feature (1)...(292): n = A,T,C or G
actgaggtggggtctttctttggtggcatgccnaanacgaaattcaagtgagcggcancctggaagaaggaactgagagagagacaagtctgagcctgccctactttgatgaatctgccgggtcatcagtgagcagttactggcgctaacaaagaacttcaagaacgaggagagtcctaaggaggagactgggccttggctgacaaactcaaactgacaaaaggataggatnatccagtgttaggatttggttcttctataaaaggcaggagatgaagctgaaaaaaaaaaa

SEQ ID NO: 3011 - DNA, 292 bp, Homo sapiens
  misc_feature (1)...(292): n = A,T,C or G
acaacctgtttcaagatgggtggggtaccataccacggngncagcncggctccgtntttggaaggacctgnaggtacaaactctnncctcagaatttcccagnggnctactcctttacaacgncgcccacngtgaangtactcacaccctgttgccaccccaacggtggacncccagggacaacatgttgnctggnactnttcttnaangtataanatggcgntggaactatttggatgntnggcnctatnttggtctgntgattgcagnagntctgctagggaaaacccaa

SEQ ID NO: 3012 - DNA, 291 bp, Homo sapiens
  misc_feature (1)...(291): n = A,T,C or G
actgagggactctgcnagaggcgctgccttgcctatgaggngctnacncacacnnagatttgttttccaggcgctgnanntacanaatncctggnctcancntccaatttcctgaatacacgnnaggagannggcatctnggctnnncctgnggcnnanatgggaaaaggcagacannaaatgtgggcagtcattaccactcncaacgatgtcctctggtcttaacattttaactgcaaagatgggggagaaataaagttgttttcctttttttcctcccaaaaaaaaaaa

SEQ ID NO: 3013 - DNA, 288 bp, Homo sapiens
  misc_feature (1)...(288): n = A,T,C or G
gttgtaggccaagaacccctgnaatgnagcctgagaagtgcggcctcactcttnttgnaacctgccacgatcttgagttntgtaaggatcgncngaatntgcccaggatgtcnagtcacataatgactacagntactgcttnttgntntaaggattnaacatntacagacccatgntcagatnagacactctantttttggccagcactntttcctcccanaccatcttctgnanactcactcncttgttaggcatcattcatttaccattgtttagcatttaacaat

SEQ ID NO: 3014 - DNA, 288 bp, Homo sapiens
  misc_feature (1)...(288): n = A,T,C or G
gaactgagctccaccccccgggtctggaaaacctggcancagaanggtnnacgntcccccgggcccangncncgcgctgcccctccttgtntcctnccggccactgcgctacgagcccgggatgcancgtctccaacagggcagcagccagggaggcagngagccgcgacgtgctggctgcggacctncgctgcagcctcttcgcctcggngctgcagagctacaagcgggactcggtgctgnggncctttcccgactcctacgcgncgncacagactgtaaggactt

SEQ ID NO: 3015 - DNA, 283 bp, Homo sapiens
  misc_feature (1)...(283): n = A,T,C or G
gactgaggatatcatctgatgtgcaggatatcgtctgatgtgcaggatatcgtctgatgtgcangatatcgngtgatgngcagccntcncaagtcagcgagcactggntgntcttgctgacganccaggttcagntcccagnacctgcnnggggncctcacaancanctgnanctccanttcaaggggagtgaagccttnctntgacttttgtaggnaacntgnatntacatngngcatatncanataatcaagtagcccacatatatgtaaaaaaaaataca

SEQ ID NO: 3016 - DNA, 282 bp, Homo sapiens
  misc_feature (1)...(282): n = A,T,C or G
gtgtaaccagtacaatgccaaacacttaactggntggcagttggtactgtccgtgggcgcctcggnttttatgtgtgcntttatctcataccaaacanacaatgaacaatgtttngggagtataacagcaangaaatggattggcaataaactttggaaaataatacnnncagctnnatgtggatgancacngtccttcctctgnnttcaccctcagtgacgggatgngagcaaaagagtnacatgcgaatntganncagtcaacacgttttgcatggttaa

SEQ ID NO: 3017 - DNA, 281 bp, Homo sapiens
  misc_feature (1)...(281): n = A,T,C or G
gactgagtaaggtcctgntgnggtcagngatggaggcgagcccaagtgngagcttnaataaagacgctagagcacctgcatcggaancggctacacttgccttntgacacagggttttttactgaacctgnanctcactgattggctagactggccggncaacggagctntaaggggtccccctgncttcatactcccagcactaatatacagacgtgtgctgctgtgtctggctttttatgtggatgctaaataaagagcatgttctcacaaaaaaaaaa

SEQ ID NO: 3018 - DNA, 281 bp, Homo sapiens
  misc_feature (1)...(281): n = A,T,C or G
tgcctcctggaagggaacaccaacccgggcccccactgnaccagtcgtcggtcccgcccnccaccactcgagcactgtcccatccngggggagacacaggncaaaganggacccctngtgagcatgggcctgggccacgatcgtgtaggtctctgttggtaanggctaanaaagttntgcttttaaanaaaggagcagtttatannatcacaacncanactaactctanctnccnngcacccacngaagactntttaagcctaatcatgactacaaattca

SEQ ID NO: 3019 - DNA, 280 bp, Homo sapiens
  misc_feature (1)...(280): n = A,T,C or G
cttgggaggatcaagatagaggcactgtcccccggactagttttctggccntnggaagtggacctntntatggggctggnnacaacactgggctaccatgatggctgnttgctagctcaagccaaaggataggtgtatggataaatcttaagctnganccaanaattttctgtttnactgttnttaggctaggtgacctngctngcaganggnggcatgcttgcctaaccactcnncctactgaggctcaggtcggggggatgctccactgaccctgcta

SEQ ID NO: 3020 - DNA, 280 bp, Homo sapiens
  misc_feature (1)...(280): n = A,T,C or G
cataattacttcttgtaggnactctcaaaggncngncaggagaaananactcataattnngaccctgntactnaantcgtgccaaggngccctgtgggccaagccnaactgaccagaaaacccatccagatggcgtccctgcccaatgcagactcctgtgcntggatnacctggnccgtggcagntggggcctnacccatgggaaggggactgaatgccattgactagangnctgnggcaggctttgattggctacnaaaaggccttgcactacccactg

SEQ ID NO: 3021 - DNA, 280 bp, Homo sapiens
  misc_feature (1)...(280): n = A,T,C or G
gaactgagactgaaagagagcanatagagcagcgngatncggtcnangcaaagcacttangcnngctcanttacanactgncaacaagcaacagngcatcctctccccatccctgcatgtgtccttctttgcctcataaggcacttccaggcttatctgttcatctctgcctcaaacagtgcatgcaccagcacaccctggcctatgtgtgctaaggaccacaccaggntntgctgtggactnngacgngttccctatcaacgtgaactacacaccaact

SEQ ID NO: 3022 - DNA, 280 bp, Homo sapiens
  misc_feature (1)...(280): n = A,T,C or G
cgggtgcagtactccgtnaccctagnggntttccaccaatgngnaggnagnngcttacccaccagcaccangtggtgggtntccaagtagctgnnatgctaccccangcctgggggntatcncagcccctgggggctattctaggaaccctagggggggggggncctccaanctatcctggaggccaaggctttggggccccacccgggggancaggctnttctggntatccacagacacctgnacaggcttatgggggncggnccagttccaaggtcca

SEQ ID NO: 3023 - DNA, 277 bp, Homo sapiens
  misc_feature (1)...(277): n = A,T,C or G
gattcaggagccacaccaanggggggncattctttggatgcattgggatagataannttgggggagatccctgaagcggaagggcttgttgacgcacatngnggatgctcatttactattgagccagaccgagcanccaccaggaactttgggctggggggcattaacttggnggncaccagggnccccttnggtgnttacccttggctggcggccaattgggtnccaagaaaggagaaggcccctttgacctgggngcggaactggggggggtggg

SEQ ID NO: 3024 - DNA, 277 bp, Homo sapiens
gaactgaggttggaatatacagggaacagttggaccatccctgtttcaggctgggggtttgatttctatacacttgctgtctacaagtctctgcaggacaccaaacccacgactgaatgacacagccagcatccacaattcacacagagaggtaaaaatgtcagatccccacgccagttgaaccagaagttctttgtacattagaacatttaatgggaaactgcatatgaactgtaaagtgtaaatacagtctgtgattgggattagaaaaaaaaaa

SEQ ID NO: 3025 - DNA, 277 bp, Homo sapiens
  misc_feature (1)...(277): n = A,T,C or G
attacctcacgtattnacatagaggctcctgtgnaatgcttattctnacgnagtagtcctgantcctgctgnnnggaatctctggaagtcactaancagttnccagatgcgctgagccnggaannatgnaatggactctggtagggtaaaggccgcctgctacanntccngaggatgccagnccaacccctggtnaccnacgcnggggtaagaaaactnnntgnnacaagctgagcttttgatgcccacatgtgagttgaggtgcgagcccccctcc

SEQ ID NO: 3026 - DNA, 277 bp, Homo sapiens
  misc_feature (1)...(277): n = A,T,C or G
tctcgcgtctataaagnganaacanacacgcaggacgagcntggcggggtgtctatctcacgagagatntgccttacgagacaccntggcnagagaaaaaaacactttnactcntgagctctccttatggttnggngggggtatatttctntcanatatncttgttttgagaagagaggtttanatattaatnagatggagagananacacactctctttttcacacaccnccttanagaganatacatacaaanatacagaaataaagaaaatata

SEQ ID NO: 3027 - DNA, 276 bp, Homo sapiens
  misc_feature (1)...(276): n = A,T,C or G
acacacggtgcacctgtctacgtgnaccatgagantgatctgggggnaancgggnccnctncccctnncttnataacnagagncggcaacatataaanatttgagcnntngagtcngaagcaatggaccgnaacncaanggngngtncgtattgnatggctggagaccctgctccctcctggtcccatcaacccaaataccaccaacctctactgttctccatcattcattctcccatcaatcattccaacaacaagcactctggaaaaaaaaaaa

SEQ ID NO: 3028 - DNA, 275 bp, Homo sapiens
  misc_feature (1)...(275): n = A,T,C or G
gaactgagagttccctcaacttaggctggatagccaggctttcctntttccatagncggacgttnacggnctccttcctgnccanagctttncaaagcagcctggtcaaccgagcaaagcttcgtggagacagactggaaggtgggcgtctcttctctagaaagcaggagcaggcgctgaggaggcccgaacaaagcaccgacaaccgtctttttatactaattggttcaacatcaaagagtgacattttattctcccatggttaaaaaaaaaaa

SEQ ID NO: 3029 - DNA, 275 bp, Homo sapiens
  misc_feature (1)...(275): n = A,T,C or G
attgaaaagtggattganaganaatttcctgtgnntgtttctgtncctggtgtgantgngctgganaagaggggactgnncantaggancatntttgtgaggcaggacctcacgcncagnaatntatnctggacctgcncagctccangatgcctnnggaccctggngttgcatagtacataacatgacacagnggctcacagnagcnaatganactggggtttgtcttgctggtcaagaaatcaaataaatgttgttgttgttaaaaaaaaaaa

SEQ ID NO: 3030 - DNA, 274 bp, Homo sapiens
  misc_feature (1)...(274): n = A,T,C or G
aggactgcaagtacagtctgtggtaggtggatagnaccaaccacctggnaggctctgaaatcatcctcttggcagaactgcagggaagacgtggtttgttcaatccccagaggtttntcccgcattaagatgctcctggatataaccagaacaccaccgggctgcaagaggactatctgtcaggcaattattgngtattttccgaaagtgatgctgccatgcaaaatgtnttaaaataaattganngtnctcttccatttggagatgaaaaaaa

SEQ ID NO: 3031 - DNA, 273 bp, Homo sapiens
  misc_feature (1)...(273): n = A,T,C or G
ctttcgctgcagaactgnangctgtgcctgnnggnccttnngagccgtctcanctttcacatnctccagtgncttcnctaacatctggattttcatcnncnggctcttntgtatggaggaaatgngctccattgacnganactggtgctccaacntgggacngcttgatttttccctggaagagctgggtttgaagcncctcagattggttggcgaacctgagngncaggncttgntnncttcgaataatctccccaagggcctgaccataga

SEQ ID NO: 3032 - DNA, 273 bp, Homo sapiens
  misc_feature (1)...(273): n = A,T,C or G
aaaaatggttatggtacaacccactccgctgcttnnggngcgttagtttgtgaggcnntattatcactttagctgactaaagctcccgagtntttgcncaggttctatggncagggaatnncncctatggtcatggcnggaaatggatgccatatgggaaancccnangcaatcagttnatngccanaatgatatacnccncacanngntatctctgaacttnaggggaatgtcataccaagaattnnncatgtggatgctcatggcaacctt

SEQ ID NO: 3033 - DNA, 272 bp, Homo sapiens
  misc_feature (1)...(272): n = A,T,C or G
gcatgggacttacacatggacttctggcaacagcntggaccaggagcagcacacatggtctcaaacatcaccacatgccagagacctcagcaggnntccagnggccctaccaatctnagnatntcaacatggccctcttgttttaggttatctactttntcaccatccacaatacagctcggatttgcacactnnattntctgtnctgnaagaaatgngntacagaananaagaagtagcaggatgacgaggaggaggaggggttgaaagat

SEQ ID NO: 3034 - DNA, 271 bp, Homo sapiens
  misc_feature (1)...(271): n = A,T,C or G
gtcaagagtgctttcctganataaaatgtantcccnacgcangananctttaatggaggggaatcncctctgctttnatgttgnattggnaagcanctctaactcanaantntcntcccgccngcagcatatnttctnaantcctttaacttccaagggcacgggccacngcgatggcagactatatccccaaggaggcttggtnacactatccctacancttgcggtgtaccctcagnactttgcagatggggccacgggatcttgaaat

SEQ ID NO: 3035 - DNA, 270 bp, Homo sapiens
  misc_feature (1)...(270): n = A,T,C or G
tggggtttctgcgtaagggtaccacccgtcaagatntcanagtaactngnagntacaaggaggcctattcttgnntngnaaaaccccnangaagactaccnnctccagactggagtgtaataacngtgggacagggtggtanggttgncctactacccacnggcttctcnttgggcgacatttagagaccagtgcctgagatgatanatctcangtatacnnaatcagcaccatgttacatgtangctgatgctcctttagcatcaggtg

SEQ ID NO: 3036 - DNA, 269 bp, Homo sapiens
actgagaactgggcagagcggaattaaatggattttgctggctgcacagaaaagcaggataggaaagctggcgaagagacgtaatcagtcagtcccaacaaaatgagggaaggaaggaacattaagaagaaaatagcggagccttgaggtgaagatgggagtaagatggtgcctgccacaggctaccttctcttatgtagctgaagatgaccttgaacgttttttgttttaattaaaaagactacgttgattatttttaaaaaaaaaaa

SEQ ID NO: 3037 - DNA, 266 bp, Homo sapiens
  misc_feature (1)...(266): n = A,T,C or G
aatctaccctgaggaaaacangaggtgatctttctgcaagccancnncntgagtgcggggatgagaaagangactttagaagaaactgtgcctcttcttcccattactcacaacagcagtctccccatanaggggcttcttgtttttccagaaaatcaggnatagatcacaagaactccccncacagcanatctggatccagtgnaagccattcnccaaaacaaagcaaactgcattcttcccatgggtcagagcttaggcaccca

SEQ ID NO: 3038 - DNA, 266 bp, Homo sapiens
  misc_feature (1)...(266): n = A,T,C or G
actgagggtttctctgaaacagcccttggctgttctgaaacttgctctgtanaccatgctggctttagactctcagcgatctgcctgtctcttcctttgaatgttgggattaaaggcctgcactaccatgcctggtcaaaaggaacagaatcttaaaaacaaagaatatgctgtactggaagagaacaggacctgtagttcaaatgtaatcctcactaataattactatgacattttagaatgttttgtaattatgaaaaaaaaaa

SEQ ID NO: 3039 - DNA, 266 bp, Homo sapiens
  misc_feature (1)...(266): n = A,T,C or G
gtagccgtcccccccatcttccttngctcctttctcgcaatcctcttgtttcagtttaccaccctgctgntactntccccatcattgncaacttnaagtngaannagtactncctnncttgttttcccacttcanntctctcactattactacttgccagcctgattctccttcccggaacccncntgantttttggngnggagaacctncttncntanntcctatcctctatcctncatnggtgcctgggccctgcacactcctt

SEQ ID NO: 3040 - DNA, 266 bp, Homo sapiens
  misc_feature (1)...(266): n = A,T,C or G
tgatgccggctcgtcccancctggcncntgnactncccagcagtatagtcanatattcaangctcgccagcacagacgatggcgtacattgaccttgagccttaatnangtctcgtgaagctncccttgancngaatctactttatgatgcngngctttggtcaangtntgaanganggnagcgtttatgaggtcggatanntcagntctnaagagcacatncctgntgctgcatgttgttatttattnccattaggttccttaat

SEQ ID NO: 3041 - DNA, 265 bp, Homo sapiens
  misc_feature (1)...(265): n = A,T,C or G
ggacacttcgtctgtccgcnggaacatgnnnactcacgcngnggtggnagtcgcttaccncactctnggcacgagcacctaattgnccccggncaccctcgcngntagctnngcncntccaagcacantggctacactgactgnaaaggccctngcaggtaatcctgncaaacagtnntccagcgcgatacacactactggctggcaaagggcacccaactaatggcatatgccctggnngggggccaaccaataaatggcggga

SEQ ID NO: 3042 - DNA, 264 bp, Homo sapiens
  misc_feature (1)...(264): n = A,T,C or G
ggagcagtctacagcnaccacgctcatgtnaggcnaganattgtacgcggtggnaccaaggtgggtgagcaggtncgngacgaggaacgnagncccttntgggggaccctnaaccatgggcgaacgggggcagnttcactggggaaggcgagtgtgttctacaacagcnagnctgcctcatttggggccanagntggttgtgtcccaaaatatgttttatgtggaccgangaangcgnggggaattattacccatacaccatgg

SEQ ID NO: 3043 - DNA, 261 bp, Homo sapiens
  misc_feature (1)...(261): n = A,T,C or G
gactgagcccagaccccatgggagctgagtatggtggctgattttctaatcccaagcagtcggaggcggaagcaggaagactgtcatgaatttaaggccagcttgggcagcagagtaaagctccaactcaaacctaacaangaaaagtcctnctggntntggaagaaggctggctggctgggcaagagggcccagttgccaaggctgcctaacagaggctggcatggctctcacctcagtgatgaacaggatgcactggag

SEQ ID NO: 3044 - DNA, 261 bp, Homo sapiens
  misc_feature (1)...(261): n = A,T,C or G
tggcctaatgcgtagatcgnagganattanangcccagcttacagtggatangacacagcgcttncacacgcanagaaagatgcagctcgagaantggagacaagccatgtgcctactnctgaacaaatggataatgcatgatgtgtacatatacgcaatagaataccattcatcctcgaaggaagacgaaatcatgaactttacgcagaagtggatggaatcagaaaatatattaaatgagataacccagaaaaaaaaaa

SEQ ID NO: 3045 - DNA, 260 bp, Homo sapiens
  misc_feature (1)...(260): n = A,T,C or G
actgagtcggctgcacggctccgtggggatgataaagaagctcgagtcacctgagtcaaagaggtaaancagaagaggatgtgcttaacatccactggaccggagaaatgttgcctgagggtttcaagnntnngacaggncgtcangcctcaagcttcttactgtcttntcaagtgntantggtcatgggcanttggccccgttgcctancctcacacatttattgttcacaaagattggtgattccttggaaagaaaaa

SEQ ID NO: 3046 - DNA, 260 bp, Homo sapiens
  misc_feature (1)...(260): n = A,T,C or G
taggattttccttccagccacggtaaaatatcctttactaccaggcagggaagnattactgcaagttgaaggccngnctnggnttctnagtanacaacctgcttgnnnctntcaagatgctggnaattanaaggcatgcatcaccnccgcccgactgtgtnctggnaagtttttattgaatttatatntgtncctcatgtgtgcctggcagccatgggnnaccaccaagtaggatgttagnacccctggaaactgtaata

SEQ ID NO: 3047 - DNA, 260 bp, Homo sapiens
  misc_feature (1)...(260): n = A,T,C or G
actgaaagaatgcgagtaccnggnagggcgagaccgngggaaaggncnttccgggtccgtaccctcangtcaacgcttncccctgtncctactctncttcgcttnaaaaacaaaccaggncngctgnnggntgtctttnacagnaatgccttcagtactgccaagaaaaacttttctnctcagtactnatgngtgggcggnaattcttataatgctngttttgaaggagttaaattaatnagatggaaaaaaactccttt

SEQ ID NO: 3048 - DNA, 259 bp, Homo sapiens
  misc_feature (1)...(259): n = A,T,C or G
tgcctcctactttcttcatancnagtgaccaaccttnacaagttgatncntgtttngcnatccacaaannacaccnaattntttttcctgctttggtgactntacatagttgtctttccagcgtggtgtcctagcagatgccagcactcttaaaattgnatattgccaactctgtgacttctttccatgctcccatgtatttccttaatcttctanaacattccatcccattggtacttcaccatgtccatattgagcc

SEQ ID NO: 3049 - DNA, 259 bp, Homo sapiens
ctgaccacataaacaacactgccagacttgactgccactgtgggatggagcctggcctcctccttgaacacctttgtacaagcttttccttgttgttttagggattgaagtttccaggcctcttcttttcacattggaagctatttgggtaggggttggtctggtgctgcttgtactcacatggtaaattctgtatcctgcagacttatatttttcaaaacctactttaataaaggaacttaaatgctaaaaaaaaaaa

SEQ ID NO: 3050 - DNA, 259 bp, Homo sapiens
  misc_feature (1)...(259): n = A,T,C or G
tctgacatcaaacagtggtgttcaaaaactgnntatacnttatanagctacnggngctnatgagatgantcatgtggtcaagagcacttggcctgntcttccagaggacagagggttcaattccctgcaaccacacaggtggctcacaacctgacagnaacatccagntccaggggctcggacaacctcacagactgngcagtgccggaaaaacctcantagacatgaaataaaattttaaaaagtttaaaaaaaaaaa

SEQ ID NO: 3051 - DNA, 257 bp, Homo sapiens
  misc_feature (1)...(257): n = A,T,C or G
agatgaatccaggcttctgagtgcaggagtgcggctatatccctgccagataaagggtncagnnaccnatctgcactggngntagngnntacncaatnaggtancanntgacctcttcnctgttgatanaccacnacggcnctgantcagagaggtgtggaatgatcanccnagcacatgacctctttgtgcttcttatgctanactgactgactagacttgcgttctgtgnttttactatgcctgcacaaaactta

SEQ ID NO: 3052 - DNA, 256 bp, Homo sapiens
  misc_feature (1)...(256): n = A,T,C or G
cacaacctcaccacttaacagggttggaccgncaggcagagaactgaagctggtgcagctgacccactctncttgtcttggcaacactcttgnccgtgctttcacccggttttgncnatttnggttgtgtacaggcaagtgcctttnggtnaagaaagcattgtgttggtctgaggtctantttngctcagttgttattaataacctacccngaaacacttcnactagnctgntagttgcgggagaattgtgctgg

SEQ ID NO: 3053 - DNA, 253 bp, Homo sapiens
  misc_feature (1)...(253): n = A,T,C or G
tgatgaggcttctgtncaacccttaaaaaganagctgcccttgacgcnggaggagcgnnactctgncttctgaccnatgaacgcactaccntacacactatgngacngtgaccaccacccagtgaccagcgtgctgcttccatgaangnaccagaggagagangatgggaaaaggtcttattggntgtgntggtcattnccccagactggttttggtttttggtttggttggtttggttgggttggtttaatg

SEQ ID NO: 3054 - DNA, 252 bp, Homo sapiens
  misc_feature (1)...(252): n = A,T,C or G
agatgaaacagtatagangcatgagactgagtctgtgntatcatgggtntacactacgtcncaggntgatcagcaggagtntttatacccnggncactganagntgtacttgaaggataagntccatnacacntnacagnagccacactnactaatnagtnaagaatgttncnaanacaatatgttattaatnctatttcgactaancttaagatttgaggttaaaactttgaataaaagagttatttgaaa

SEQ ID NO: 3055 - DNA, 252 bp, Homo sapiens
  misc_feature (1)...(252): n = A,T,C or G
cagactgagctgtctatntgtgancagcagcagcagcagcagcgctacaactgcccaacccaggcaggcagcatgcccttgccaccacagtgcctagcaaccaaccagagcttgactgacccaagagcctggaaccaagagaaaaccaatgcctagcagagaaggtgcacaaccacataaaaagcgtcccctcccacattcctacctctgttactgaagccaccagagttcagtgcactttaaaaaaaaaaa

SEQ ID NO: 3056 - DNA, 252 bp, Homo sapiens
  misc_feature (1)...(252): n = A,T,C or G
cctgccccctgagttcagngctggagcagnacanagcacacacacgaaccatngtgngcctgngggaggaggtgaggaacctgtntggcnncctggctgacatccaagaggaaatgggtgcctangggtncgaggacttgnnacagcgcccgatggccctggaagcccgactccatgcctgcgcgcaaaanctgggctgcgggaagctgacaggcgtcagtaaccctattaccattcgggttctccagcact

SEQ ID NO: 3057 - DNA, 252 bp, Homo sapiens
  misc_feature (1)...(252): n = A,T,C or G
cttgtggtcatgcctccattgacagaaacccgntgaagaanaacctnttgngaggttcctgcagcagcttgcanatnccctggcctctccanagnccagttggtgagcctggtggttccttcaggattgaactacagcgtgcgtggnttgtgccttggngtntgncatgcatgacttttcttttccactagcttctgctggatggtgggcaagaggacaggttgaccccttattaaaagtaggttgcaaaaa

SEQ ID NO: 3058 - DNA, 251 bp, Homo sapiens
  misc_feature (1)...(251): n = A,T,C or G
gaggacctcctgtaagtacaggctgcaanntggntcccgtgtgngtgcctcaaaggcctgtgncntntctggtaacagggccctgggnggagcgctnacagccagtcccctgctgtcctccggnagagtacttntgcacacattcaaggatccactgagggangacngtctgtntgacnttcattgaatnntacanggctaacttatatttnaanctcnaaacngaacagagcagcatcctatcagttcat

SEQ ID NO: 3059 - DNA, 249 bp, Homo sapiens
  misc_feature (1)...(249): n = A,T,C or G
atatggcggactacacnggacttacttttactcataatnngtcncgtcgcnggaanancttgtagaatgacacnaaaggantgggnganggtacctgttagctgnngccttgaagatgatgaagacatgatncaaggtaacaagaggagtgcagcacaatgtttntttctcttcttaaagcactgncatttaaacatgaacctcangtactcaaaatggaattnagcctttcaagacaaatacatggca

SEQ ID NO: 3060 - DNA, 249 bp, Homo sapiens
  misc_feature (1)...(249): n = A,T,C or G
attcccaccacctggcttccgttaacaggnaagcggaaaaantgnctggtgattcaggnggacttgtcatgtcctgggaattttnncactntttgntctnttaacacngaacacacaaggaaggcactgggaccagganggcttttnagangtctgtgtatatnccgngattgngtaagtanngnacncaccttgnaggtccatatctgggnacaagcaccacngncaagtagacaaagggctatgtga

SEQ ID NO: 3061 - DNA, 248 bp, Homo sapiens
  misc_feature (1)...(248): n = A,T,C or G
actgtcttaaaagcagctgaggagaggctcagcaggccaggagcccttgttgcttttgatggggatgagagatcaggcctcaacactctcagggctgcgcacagcctcctgtgactccagcctgaggagaaggcatgtcccaatcatntgtgacagccccaggagaatgagtgtccccttctggcctctgcagtcacttccctnatggnatatatgcngagaaaacactcatgtgtttcaaataaaga

SEQ ID NO: 3062 - DNA, 247 bp, Homo sapiens
  misc_feature (1)...(247): n = A,T,C or G
atgagagcctgctttctgctgctgggcntgnctatctgctntttgcactctgagncaggcagagaatnccaaaatgaaaaganaggtgaggntaanatggtanaggtnagacactgctggcttcaaggnctngttaaatccacaccacatggtgntacaccatctgnacaagattnccccncttctgagtgntaagcagcncaagtgnctncatatataataataatcttttttttaaaaaaaaaaa

SEQ ID NO: 3063 - DNA, 247 bp, Homo sapiens
  misc_feature (1)...(247): n = A,T,C or G
aactgaggctcgcgtnggtctacatagaagagtcccanaatatccagggctatatagaagaanccatctnaagcgngacgatgacnacaacatatgatgacagatgacnacggacgacgatgactttgatnaanacnntgcngncggcnagaccttgcttcccanttgtaggancnctgggtnaatgcgatttggccactgnaccactatcaaataccacattttgctttgttttgctatttaaaca

SEQ ID NO: 3064 - DNA, 247 bp, Homo sapiens
  misc_feature (1)...(247): n = A,T,C or G
gtggcgtctcatggttggntgcngctctgcagttcacncccactctttgnntgggncantcncccttgaatnggaccccgtgcatctcccaccttctgntgtgttngacgtcatgtaggcatngnaatccctntgggnagtnaccacaccagtatacttcctactcaacatatgncctgctggcatcagtaanaggaagtgnangcccgctacctttcanncaggatagtggcactacaccttggat

SEQ ID NO: 3065 - DNA, 246 bp, Homo sapiens
  misc_feature (1)...(246): n = A,T,C or G
ctcgcgaaaacaaggatcatatgntgtncgtcatacaatcgcataacatacaacagagngttgtccggcaccancnaccctggtgaagaantgccatcgtcgccttattgacagcacncgcgtnccggacagtggtacngagtccnantatgcacgtgcctctgggccgcaagaagggggccaagctnncttctgtggacgaagagattntatacaaaacatnatcagcgatattcaaaagcaact

SEQ ID NO: 3066 - DNA, 243 bp, Homo sapiens
gactgagaacactgacgtcttccaacggcgctcagagacgcacctggagttccctctaccacgcagacctccagctggccgtcccaactgcttcttcatcccaacctcaagaaagggagagatttctagtatgtgggagaggcgccggacaaagagacctgggacagacacagattgtcagaaaaaaagaaggggatgcagagaaaagaaggcacaaattaaagcaaaacaagaaaacaaaaa

SEQ ID NO: 3067 - DNA, 243 bp, Homo sapiens
  misc_feature (1)...(243): n = A,T,C or G
aaccacaaccccctgacatggntgangtcttcttanacagnatcgaatnagnncancccncaatatttcgnggtaaaggnacatgncaccagaccttngtctggaccttcagtctgatngngcataaaaaganggngtctatgattctacaaagctcctngtggggnanactttgttcagaacaagtttgggcagccnccttgggatttctgcgctgttcagncngtttgtttggaagacagg

SEQ ID NO: 3068 - DNA, 242 bp, Homo sapiens
tgaggtggggtctttcaagagcagcggtgctgacaggagagcagagggcctgtgcagcagctgaagcccttctccacagaggaggaacagagccagcagcagagacctcgcagctcctctcagccccttcactggcccatcctcctatgtgagagcctgctcgcagaatctccttgccactgctcaagtccctacggaacaagcgaggcccagtgctgctgaaggatcggtcgctcctgttc

SEQ ID NO: 3069 - DNA, 241 bp, Homo sapiens
  misc_feature (1)...(241): n = A,T,C or G
gaactgaggagctgcaaaaaggctgagnagtagatgtccatgcttaancagtgcttgctgctcttccagaggacgcacttggatctcaacactgacatgggggttgggctgacagttgcacgtanacacatctntaggtgatcngacaacacctttggcctccaaggacatctgtagtcatgtgtgtacacgtcatacatagacaaaatacagatatgtaactaaaaccataaaaaaaaaa

SEQ ID NO: 3070 - DNA, 241 bp, Homo sapiens
actgagaagagtgggtctgagaaacagagagtgtgggtaacaagcagtccatccgagtttatgtgacagatgagtgtgaggaatccaatgtatcgtgtaggatatgaggcagtgtggacccaaagataaatggaacagcagtcttttcagtatgggggcagcatcgaagaaagagacccaagagggaagatgctctgcatgaaagaatcagaaacaaataaacaacaaatacaagcaggaa

SEQ ID NO: 3071 - DNA, 241 bp, Homo sapiens
  misc_feature (1)...(241): n = A,T,C or G
ctggggtttggacactngtgatacacgcgttgttnctcctaggtggcctncaccagctcataatcgtgacaaacntccacaattcagctttnctgcaananngaaggctagggtggtcacctgccttcgaagntactctgggcaacnntggaacatacacttgncngtctgnnnaaanncgactgtctacaggntgtagagacanatatcactaggacncggntggggtagaacttgcgaa

SEQ ID NO: 3072 - DNA, 240 bp, Homo sapiens
  misc_feature (1)...(240): n = A,T,C or G
ttcccgacctctcattcctaggatgcnnnnagagaggccgngggccgnttttgncccaggaaaaggagaaagaacccntcctgnaaccgagtnnataagccaagcaagantgaactttgtnactnccaaataaatagcaacttantttcaagacctcaaagagcaattgacagtaagcctgaccnaaggggactacaaaatccananagcagaacacgctncaaggcaaaggaaaaaaaa

SEQ ID NO: 3073 - DNA, 240 bp, Homo sapiens
  misc_feature (1)...(240): n = A,T,C or G
gtctgtcacatcagtacatgggcaagcttgntgcagatgctcagccccgcccttagtacaacactggnttgcaagcagcaagnggntggagtatgtangtccagcaggcggttntcccagccgggaaggccccgcctgcagttggcctanctacctttanntgntgntaacaaaagccaaatggaaagnctggtttngntgcgaaaagctcctttgctatntggccccaaacggcccagt

SEQ ID NO: 3074 - DNA, 240 bp, Homo sapiens
  misc_feature (1)...(240): n = A,T,C or G
agtggggtctttcagcgacatgnantaagttccagaaatactgttaacatccactgccccaccaacacgcccacgctgtggagacagtagttgtcgaggctgcagaaaatttattaccagtgtcgcggtgtttgctaagacagaaagcttccatctcatgcttttgagttcaccagagaataaaatttgatcattaccatgcttgtctgaaactagattaataaaggcaaaataaagctc

SEQ ID NO: 3075 - DNA, 239 bp, Homo sapiens
  misc_feature (1)...(239): n = A,T,C or G
tcgcggatttctgccttcatctncttcancctgnggactgggactggcacccaggactacagctncangcccaggtactcacgaatgccacangaccggtagtncacctacagccntgctntcccagggaccaggcatgtaggaanntgattnngtagcctcactncgaggacccttggganagattntacaagtagnanntnnctgctgcagataccgggaggcacccaagcccccca

SEQ ID NO: 3076 - DNA, 236 bp, Homo sapiens
  misc_feature (1)...(236): n = A,T,C or G
aactgagcccatttgnttcataacatctganctggcagcgacccatgtttctgtaggctnnnaacaccactgacaatgacactctgaatctgcgtctgngcaactnntaatgaanaattgttgagcgtnatacctggtggatactgganganaaacgganatggcaaaagggatacacgannaggcatgcccccgaggcccagnctggcttcntaccaaaggaggtcacacttgtg

SEQ ID NO: 3077 - DNA, 236 bp, Homo sapiens
  misc_feature (1)...(236): n = A,T,C or G
gggcggcgagtcccgngggaaggggntcccgggnccgtncccacanttgaactcttgcccctgnncctaccttctncgcttgaaaaaaaagcagggcggtgcggtgctttaacagnaatgctcagcactgcaagtaaaactttnctnctaagtactntgttgtgggaattttaaatactgttttaaggagttaaataataatgcaaaaaaaccctttaaacactgaaaaaaaaaaa

SEQ ID NO: 3078 - DNA, 235 bp, Homo sapiens
  misc_feature (1)...(235): n = A,T,C or G
tgaagaaaaggcccctgcttgagngctggagctgngcacatactgngnatactntacactgcttattgngcgagccttgcacnntgnaagncnncttctcactgtggagcgnnactcangtacagcagcantgnctgacaaagtcatccggttgncaagcttcgatgancaaatggtgganctnattgcaggcagntcagatgaagtgatccnacgcctaagagctcaccaccag

SEQ ID NO: 3079 - DNA, 235 bp, Homo sapiens
  misc_feature (1)...(235): n = A,T,C or G
gcggcgagactcgtgggatangttnttccggggccgtncccncattgaactcttnnccctgttcctaccttttcgcttgangnnaaaccaggncagtgacggntgctntnacagaaatgnctcaggactgcaacaaaactttnctnctagtctttgttgtgggaattttaaatctgtgcttaaggagttaaatagtaangcgaaaaaacccttttaaacactaaaagagaggaaa

SEQ ID NO: 3080 - DNA, 234 bp, Homo sapiens
  misc_feature (1)...(234): n = A,T,C or G
ccccgctgtgcagctattacgattgcctcggaanaangctaagccacctgctgcgggcacgcgttgccatgtatccggctggggcttcgtgtctgactttgaggagcctccgcctggactgatggaagtcgaggtgcgcatactggatctgagtgtctgcaacagctcctggcagggccagctgaatcctgccatgctctgcactcacagtggggaccgccggcggcgtggttt

SEQ ID NO: 3081 - DNA, 231 bp, Homo sapiens
cacctgaactatgagatggtgctgctggattcgagaactagacccaggaggaatgggacaacagggaagaatcagccatggcagacagagaagctcaactacgaaaagccagtttatacaggaagaggctgaagcagagggaggaaatgtcacccgatctggcgggaacacaaagcaggaagctgatgaagctgatattaaacacagacaggctccgtgtaaaaaaaaaaa

SEQ ID NO: 3082 - DNA, 230 bp, Homo sapiens
  misc_feature (1)...(230): n = A,T,C or G
ccaagcagcttactgtgcccccanaaaggnnagagtggcnatcaagcggntanacctggagaagtcgtcagaccacgcatggatganctcctggcacgcncagttcaggctccctccacggagggaggagtgtgttcttagagttcatgttaaaaaaagaggtgtttagtttcttttgagaacgtgacttattttcattaataaatgattataaaatttaaaaaaaaaaa

SEQ ID NO: 3083 - DNA, 230 bp, Homo sapiens
  misc_feature (1)...(230): n = A,T,C or G
cctacagcacctgcccaccagtgaatggtaactcaccgtantcatacagccgtcctctcttgntcatggccagggcgcaggtangcggnanaagctctgtnggcanaatgccgccgtnncggaaaccaagctctgcctagtggagtgtcctncgngcatnggctganancaaaggagaacgantgggactggccatgcaccccggggtcntcaaaacaataggagtgggc

SEQ ID NO: 3084 - DNA, 228 bp, Homo sapiens
  misc_feature (1)...(228): n = A,T,C or G
cctggccctcagcactcctagatctgaccatcaccacagtcaccctgaagagaaccagcctgacccgggggtgggcaggccaaagtcaactggaaacgctaaagaacaaagccaggaagaggactcacccctgcaccgtacacctttgctcagcgtgcctcgccaggntcattgaatttatttctcacctttatcataaaattaccaaactggccccaaaaaaaaaaa

SEQ ID NO: 3085 - DNA, 227 bp, Homo sapiens
  misc_feature (1)...(227): n = A,T,C or G
ccttttgaagacacangccgcagcagtgtccggtgtcaagcannaaanagtgncttactctgataacanggcatgtgggttctgaggannnaacaaggccatccgccttcctggcaagtgcccctgccaggagattcccttctgataccaaccatgatgcctggtattgtgcagtaaacttctttttctgctagggggggttaccngtttagagaaataaaacaaaa

SEQ ID NO: 3086 - DNA, 226 bp, Homo sapiens
actgagcctgcagagccaagcccccccagcaaacactcccatcaccaggatggatgttctgcctcagaacaggcccagaaaccagcggctgtgcggagaccaagtgaccagggactgaactctctacaactctcagccaagttaaacaaaccctcgtttaagctgtcacatcaactatttcttcacactgaaatgaaaagaacactaaccccctgaaaaaaaaaaa

SEQ ID NO: 3087 - DNA, 225 bp, Homo sapiens
  misc_feature (1)...(225): n = A,T,C or G
agtgtagtgggaaacgcacgctgaaangcccggtgctccgncctgtcttgcagtgcaactgtgtgtatctttgggtaaaacacaactggattcttttcngccccagctgcctcaaaatgagnatggtntaatgtttgagcatctcaaaactgtncaccatctcaattccaacacccnctatcttatttnactcactgtaatgttncatgagacgctggtaaccgc

SEQ ID NO: 3088 - DNA, 224 bp, Homo sapiens
  misc_feature (1)...(224): n = A,T,C or G
cctgagaggatccatangactgtccaannaacattgcacagcagncatgnatnncattgncagtnatcgtgacaaacctgatccttaaatcttcaatctntgctccctctgagtgcagacactcctgtnagaggcngaactaccaacttgtgttcagtgcttttctatgcttgnncaagacaccagacagaatcaatnaagggaagaaattgtaaaaaaaaaaa

SEQ ID NO: 3089 - DNA, 223 bp, Homo sapiens
  misc_feature (1)...(223): n = A,T,C or G
cgggtgccactcgatgngngcacacaagccttgtntctgaggacaaccacgggcaaagctccagancttgtactgagtgangtggaattgttttatagagcttattttaagataccttcacagggattgataagaanganaatattgatgtctctatttangagagncattaatgcacagtncngangggntggagaataaacanatctacctataccctaaa

SEQ ID NO: 3090 - DNA, 222 bp, Homo sapiens
  misc_feature (1)...(222): n = A,T,C or G
cccgtgaggaaggggatcccgggnccgtnncctcaattanctcttgnccctgttcctacncttctngcttgaagaacaaaccaggncagttgncggtgacttttacagcaatgnctncagtactgncaagaaaaactttactnctggtacttatgtcngtggtaattttaaatactgttttaagcagntaaataataatggaaaaaaaccctttaaacacta

SEQ ID NO: 3091 - DNA, 222 bp, Homo sapiens
  misc_feature (1)...(222): n = A,T,C or G
tgtaaccagaaactgctcgtcttcagggcagctgctggtcacagctgcttacacacagtctgtgggggatgtctacagnatgngncttctttccaggaacacagaatccggnttgcctcagctggctggctttccantggcagnncctgcacctgtcggtgctcagctcacanncaagctaccaccanncngcctntnctgtagagacagcaccaggacctg

SEQ ID NO: 3092 - DNA, 221 bp, Homo sapiens
  misc_feature (1)...(221): n = A,T,C or G
tcgcacaggacgcacggacggactccacaagcatgcactcggtcactgccagncgcccacagtgacngtnacccacgaaagcacacacagtagtnngcaggacngccgtggtcaagatgtctctgccatccccacaggacggacggacaggactccanattggtgctgcgtgttngtctgaggcctgtcaggactagagcgnacttctcaccggaggaagg

SEQ ID NO: 3093 - DNA, 220 bp, Homo sapiens
  misc_feature (1)...(220): n = A,T,C or G
gaggaaaagacagcagaggctcacaccctccagtacntgctgttcaggctgtcggctcccctttttgctggccacaccgnanggactggagncattgctggcagngaacancnggttncacacacctnattganactngctctttntacnaaagtnggnctcctggcgtttncctccngctccacacggagttcaccccatgcatacatatgaccggcag

SEQ ID NO: 3094 - DNA, 220 bp, Homo sapiens
  misc_feature (1)...(220): n = A,T,C or G
gacaggacctgccacgtacttacatgaagtgtgngatgcatgagnggcagtgtggaggccgcatctgtcgaaggctcagccctcgaatccgggaccagagttctggtgcccggccctggaagagagctgccattcttaactgtacacttcccttcagtaacttcctcctctttctgcctcagcccttccttataggaacttccttctctatcgaaaaaaa

SEQ ID NO: 3095 - DNA, 220 bp, Homo sapiens
  misc_feature (1)...(220): n = A,T,C or G
ttcactgcctgcctgggggggtgaataccgtantcctgtgactcagcacnggcactgngggattcagctcagctgtcancacactgccctagtatgcaccangcctggntttnaacccccagggctgngggngaataaataagcttttttttacatgtacaggtaatctctggcacaganaaaancacaataaacattgtctgcagcttaaaaaaaaaaa

SEQ ID NO: 3096 - DNA, 220 bp, Homo sapiens
  misc_feature (1)...(220): n = A,T,C or G
agtcgcgtcaggacangcaatcccgggaccgtacccacaattgaacncttgcccctgttcctaccttcttcgcttaaaaaaaaccagggnagtgcggatgctttnacagaaatgnctcagnantgcaanaaaactttatctagtntatgnngggggaattttaaatctgttttaagtagttaantantaatggaaaaaaaccctttaaacactggaaaat

SEQ ID NO: 3097 - DNA, 220 bp, Homo sapiens
  misc_feature (1)...(220): n = A,T,C or G
tggcctttggctaaacanttgaagaactcnttgnacaacagggggtgcctncgatttatggntnttatggaacaccagntttaacagnttctttcctcccaagggnntntaggtttnaggnccctggccttncagggaaaatgcccttgctttggtgnnttcttgctctggactttcccccccantggatngggaatgtgtacccatgggaagataaaaa

SEQ ID NO: 3098 - DNA, 218 bp, Homo sapiens
  misc_feature (1)...(218): n = A,T,C or G
ttccatgaacggcgagnccgngggaaaggantccggggccgtcccanaattaaccttgcccctgtncctncctttccgcttaaaaaaaaaccaggacggngcggngcttttcaggaatgctcaacactgcaaaaaaactttnttctgagtactttgttgngggaattttaaatctgttttaagnagttaantcaataatggaaaaaacccctttaacc

SEQ ID NO: 3099 - DNA, 218 bp, Homo sapiens
  misc_feature (1)...(218): n = A,T,C or G
acgtgccaggttcttggnagcaagggctatccctggtaataacgcctggggacctgggagtgtagttccccatgggacttcggaacgcttcggactgaggtccttccaactggtctcttaacggacgatagctccaaatctcaaacacagtgacctgacagtgaacgaactcggtagcccctgaagcagaatggctctgtatccttcaaaaaaaaaaa

SEQ ID NO: 3100 - DNA, 218 bp, Homo sapiens
  misc_feature (1)...(218): n = A,T,C or G
caggctcaggggctaagcatcttgtactcgttcanaggacccaagttnaattcttanctgccacatngggtanttggaacctgtctncggctgcagctncagganttnccattcctcttgcctgctcaggtgcacgtactcacntncacgtaanataccccancacgtgtgcacacatacacaatttaaaaanaaancttgaaagtaaaataaacggg

SEQ ID NO: 3101 - DNA, 216 bp, Homo sapiens
  misc_feature (1)...(216): n = A,T,C or G
acttggaggcggctgcatggaaacatgtcgnagnttcangagcnatnntanacagtggtgngctntgtgggcaccacccatgcacaccatgcacagacatatatccatacacattaaaaaaagatcagatttttaatttgttcttatgtaccttctatgtnnttcaatgcatgtgtccatttctttatattaatatacattttaccatgtggcttg

SEQ ID NO: 3102 - DNA, 215 bp, Homo sapiens
  misc_feature (1)...(215): n = A,T,C or G
gactgagaaggcctgagggactcgggttaagaatgggcatcggcgaacgacagtctccatgtttgcaaagtgtcttggatcctgtagaagagtccgtgatgagtgactgtcaagggaggcccagacacacatnccactcaaaacagaagcaaaccaaacttaagtacagtgccaacatggggctnagtaaagacatgggagccacaaaaaaaaaa

SEQ ID NO: 3103 - DNA, 214 bp, Homo sapiens
  misc_feature (1)...(214): n = A,T,C or G
acgcaggccggtacccccggtccgggaactgctgcagcgctccttcacaggctaccancttgagctccaggtgcgancctctgctcttccttggcacggcattgagcttccaggagtggccacggcctcttccaaggccttcgcactttgctcctgagtccagnagacacggatgagaaagtctgcggggctaaaggccccactccaccccccc

SEQ ID NO: 3104 - DNA, 214 bp, Homo sapiens
  misc_feature (1)...(214): n = A,T,C or G
actccttgaggatgcccagagcntagcncccactcanngncnggtgctaganagatgctantgaccannactactgagcgttttgnttgctccagagtggcgtggtantataaaggnagagtgtgnctccttgccccanacactgccagagcctgtctatcaattgaagtgtgccancagaancgtgtanacggcctgtaactgccctgaggga

SEQ ID NO: 3105 - DNA, 212 bp, Homo sapiens
  misc_feature (1)...(212): n = A,T,C or G
ggcttccattgactccaagatgacatccttcagcanncatggtcaaagcgtggagggncagtctctggcaccattctatctgnttngaaggggctcattctgntaacacagagtgccctgggctctgcatcatctgcacttggagcactgaaggtnggcaccattttatctgggggctctgnctccaccttggctgcttcccccattggaga

SEQ ID NO: 3106 - DNA, 212 bp, Homo sapiens
  misc_feature (1)...(212): n = A,T,C or G
actgccggggcacgtncccacnantaaaccctttccccttgtgcctncctncttcgctttaangagaaaaccagggcgagtgncggtgggcttttacagtaatggctncagnactgngaagaaaaactttnctgctnagtgctatgttggngggaattttaaattctngtggtcnaaggagtnaaatnaatgaatggagaaaaaactccttt

SEQ ID NO: 3107 - DNA, 212 bp, Homo sapiens
  misc_feature (1)...(212): n = A,T,C or G
gtctgacaacgagcaggcagccnacattccaatcttagaagaacagattataaatttgnaagcngaagtttcagctcaagataaagttttgagagaagcacaagatnaattngagcagagtcaganaatggtgattgaaaaggagcacagnttacaagaggcanagaagagtgtataaaattgaaggtggacttacttgaacagaaaaaaaa

SEQ ID NO: 3108 - DNA, 211 bp, Homo sapiens
  misc_feature (1)...(211): n = A,T,C or G
actgaggtgcctacaggacctccctccttgncacatctaaatangtatttanacgttgctactgnacacttctccagncacaagangggtttctcatccgctactctgtgtcattcagatgcactgtagccttctatttccgtggctctagtctcaaacagtgggtgagaagttctaaaaataaaccattcatgaattttaaaaaaaaaaa

SEQ ID NO: 3109 - DNA, 208 bp, Homo sapiens
  misc_feature (1)...(208): n = A,T,C or G
gtggatggcttccctcgccttntttcgttactggcacngcccacttgtgtgncancgctgaaggcanaccaccanacgnnacnncctgtttcttactggaaccaaaaaattattacggnggggaatcgggtccccttccccctttnctttcattaactngggncgcaacaattaaaatttgaggccttggtcagcagtaaaaaaaaaa

SEQ ID NO: 3110 - DNA, 207 bp, Homo sapiens
  misc_feature (1)...(207): n = A,T,C or G
gagaaggcggcttgcctgcntgcatnacgatgctcgccnanggcctnactgactgggaacgctgcngggaggccacgacgacggtgactacncnttantcactcggaaccagtaaattatngcgngcggcgaaatnnggnncncccttccccnttgcttaattaactggtgtnacaacaattnaaatttgaggccttgtatccagta

SEQ ID NO: 3111 - DNA, 207 bp, Homo sapiens
  misc_feature (1)...(207): n = A,T,C or G
ttctggttcacaactggncttactnttgtaacgcagtctgnntaccccacggtacattctttaccagtttccagtcgcaatnganntgntncttacgtacactcttgcgntcatgctgtagnanccttcaaacctttacttaaaaggggtccctgcgctantttcttntttantaattntgcctttattntgttggtgtttcccatg

SEQ ID NO: 3112 - DNA, 206 bp, Homo sapiens
  misc_feature (1)...(206): n = A,T,C or G
tgagatttcgccggaaaaanncacaaggagaagaagaagaatcttcctggttggctgattcttgagttnaacttnaagggatnagttgtagnacccacactctcncagtngaggggttgtcaggagagaccatcgnagcataggcanaagctgagtcctctngganagtgnanaagaagccctgctacaaggggaagaataactct

SEQ ID NO: 3113 - DNA, 206 bp, Homo sapiens
  misc_feature (1)...(206): n = A,T,C or G
aactgagtcctcagagggaagtcagttccatatgcagtcctgcntaggaatcgnaaatcatcattttgcaagtgacgaagggctccttgctgaantatccangttcttcacaaccagagtgngaggangtggcnaactgngtcattganaccactgtgccttgnnaattnggtattcaagtaaattngatatagtgggaagtcaca

SEQ ID NO: 3114 - DNA, 205 bp, Homo sapiens
  misc_feature (1)...(205): n = A,T,C or G
gactgaggtgggtttgggctgaggtagagaaatgttctggcacctgcacttgcactggggacagcctattttgctagtttgttttgtttcgttttgttttgatggagagccgtatgttagtactatcgattcacacaaaaaaccaacacacagatgtaatgaaaataaagatattttattgcggccgcntccaagtaaaaaaaaa

SEQ ID NO: 3115 - DNA, 205 bp, Homo sapiens
  misc_feature (1)...(205): n = A,T,C or G
ctcttttgacctacctnagncnngtangtanttttctacacggaagccantnntcacaacctgagggntnatnggtcagtagcgcatnatgaaggtgtggtcagaggtaaaactgtatccagtttaacagttatgttaaacctttgcccatagtaaactttataaaggaactcattaaaatttttttgtgggtacaaaaaaaaaa

SEQ ID NO: 3116 - DNA, 203 bp, Homo sapiens
  misc_feature (1)...(203): n = A,T,C or G
ttttgagggaccacatttctatattgtgaaccgcatnagagaatcaaggaggttttggaagaagaactttcaatcaagagagatgaatgccatgtgaaaagcccacctacaggntacganggacacatctttccacagagatggaacttcattcncctaaggcnctaatggcagnacganccccangcattgtttctcaatta

SEQ ID NO: 3117 - DNA, 203 bp, Homo sapiens
  misc_feature (1)...(203): n = A,T,C or G
gactgagacaggtggtgtccggggnnaagatgtcttgctccatctttggataacaaaaagctttgtgaagcaagcataaaatctattactgtggatggaaatgggaaaccttttgcagttgtcctgtatccagactttcaagaaaagacaatacctcttcaaaaacttcaagaagtaaaatcaactaaagattaaaaaaaaaa

SEQ ID NO: 3118 - DNA, 203 bp, Homo sapiens
  misc_feature (1)...(203): n = A,T,C or G
actgaggccaggagttaacttctctgcttctgctccataaagttgaagattggttgggactcagcagcgtnttccncctgccttcaaccctttcttcggcgtacnagtcannacaagcanggnttgntaaagaagtggtcagtntannatggggagccttgagangccttgctgctacgctanctcttcagacccgtaggacc

SEQ ID NO: 3119 - DNA, 202 bp, Homo sapiens
  misc_feature (1)...(202): n = A,T,C or G
atgataaatccatgcctcggnctccctncgcgnccctgtttntatgatattgatttggatcctgaaacggaacaagtgagggggngnggnttancgcaggatcttncatcttccaagnaggccacctctgtccggncagntgtctgttnaggcccactgnagaagtgtgcataagtcttgtaaagtctgtccccgccctgaa

SEQ ID NO: 3120 - DNA, 202 bp, Homo sapiens
  misc_feature (1)...(202): n = A,T,C or G
tggaaacacactgcagggaggnaagcccgggttaacncacggncagttcaaaaagcaagccaatgttcaacattttaatgtgctgtcactcattattccagnaggcaaaggggaagggatcttttccattccacatncctgtgccaccaggggcagtgcattaacgtcagcgcgnagggccagctcattaaagtattccagc

SEQ ID NO: 3121 - DNA, 202 bp, Homo sapiens
aacacaactccggtcatttgacttggcagcaagcatctgtcctgcctggccatcccgccctccttacctgaggtttctttaatccccaaagtaactatcttgaaacataaatcaggatacagtgaggctgggacaatagaatataaagggtgacaggatatttagttgaaaataaagctataagacccgttaaaaaaaaaaa

SEQ ID NO: 3122 - DNA, 202 bp, Homo sapiens
  misc_feature (1)...(202): n = A,T,C or G
gaaaatggggtttaantccanaaccganccacgtgctaggtcaggnccancanacccttgnttaactgggtagntacggggnacctgccanaagaacccttcacaaaatcaaggccaactatggaacaaccaactatttccattcagggctgcatgggactgnccttcantntgttaacaacaaaaggcaaaaacaaaaaca

SEQ ID NO: 3123 - DNA, 201 bp, Homo sapiens
  misc_feature (1)...(201): n = A,T,C or G
aactgagagagtgttgagcgcctcccgaataaccnagcccagaaggagcagncacangangcggncccctcaggcgagtgccnaggaggancanttccttncangcggaggaggaggaanaggcggaggccgtggagtacctggccgagctgccggagccgctgctgcctgcgcgtgctggccgagctgccagctacggaa

SEQ ID NO: 3124 - DNA, 201 bp, Homo sapiens
  misc_feature (1)...(201): n = A,T,C or G
actctattctggaactncatntccagcaacntaagagctcantgtacttttacacangtacctgagttcaattcccaggncccaaggtgtggccanaaccacctgttaantccanntntngggggatatcatgccttttangggctngatganacctgtgctcccgtggcntggacncngacatgcacataaataaaaatt

SEQ ID NO: 3125 - DNA, 201 bp, Homo sapiens
  misc_feature (1)...(201): n = A,T,C or G
tcccgggccgtgcccacaattnaacgcttacccctgtccctgccttcttcgcttnaanagaaaccagggcagtggcggtgctttacagaaatgcttcaggactgcaagaaaaactttnttcttatactatgttgtggtaattttaaatnctgttttaaggagttaaataatantgagaaaaaacccttttaaacacttttg

SEQ ID NO: 3126 - DNA, 200 bp, Homo sapiens
  misc_feature (1)...(200): n = A,T,C or G
ccacatgtagtccacagcggnggccganggtaggtctccgggccgttccacagtaaccttcccctgtcctctctctcnccttaaganaaaccaggcgntgcnntgcttctacagaaatgctcagtactgccaatgaaanctttctctantcnatgngtgnggaatcnttaaanctgnnttaagagctaaataataatgaa

SEQ ID NO: 3127 - DNA, 200 bp, Homo sapiens
  misc_feature (1)...(200): n = A,T,C or G
acgggcggccgaggccgaaggaacangcantcccgggncncgtacccaaattgaacncttgccccttgtncctacctnctacggcttaaagagaaaccaggacagcngcggnngtcttttacaanaaatgnctgcagtactgccaanaaaaactttncttctgagtnctgatggntggnggggaattttcaaatcctgtc

SEQ ID NO: 3128 - DNA, 199 bp, Homo sapiens
  misc_feature (1)...(199): n = A,T,C or G
agagcctcagaactgcatcggttcttaatggtaccatacacttcctgcctactctctacctacccacacagtagggacttcaagggaacagttccacantnttnntggcnatatnctatcntgncacaaancagnngcnactgaggtgaatcaancatggaattaaaggctcnaaaancatgagctcactaattaacga

SEQ ID NO: 3129 - DNA, 197 bp, Homo sapiens
actgaggtccaggaattaatctcagaagtcacacttggtggatgacatctttccccactggaaccatctccctggcccaggacaagaagctttacaaggactgaatgagagaagtatgacaattgattagtgctgtctgcatggcctccatagggcaagtacagcaatcaattagtgctgccttcggagcatggtct

SEQ ID NO: 3130 - DNA, 197 bp, Homo sapiens
  misc_feature (1)...(197): n = A,T,C or G
acgtacagcaccctggcctttgtcacaatggagcggggtagctaaaggccagaaagagaaggaagtatgggatcgtcctgggactttcctgtctacccaaccttcccccagggacttccatgaagttgaagacttgataaaggtcctttttaggagagccngaaggtgaacacanagcctctgcctgcaattgaaaa

SEQ ID NO: 3131 - DNA, 196 bp, Homo sapiens
  misc_feature (1)...(196): n = A,T,C or G
gagctaggccacatgccgctaccnngggganaacancnttangctcangncntgatgccctcacacagggangtaatancacggnancagggaagacattactgtgagatncccactcgttccctcccactatttcnctcttanatttatacnttggggttgtgcggnccatncccacagtgaaagatatttttcg

SEQ ID NO: 3132 - DNA, 196 bp, Homo sapiens
gaactgaggtgactccataccaagaaggatgagcagtgtccactggagcgcatcacatggaggacaccagcccccaagcagtggccgagaaggctgctaaagaccccaaggctgctaaagatctcaaggatgatgctgctgccgccaccaagagcttccctgatcacttttccagagagggtgatgatcaaatgga

SEQ ID NO: 3133 - DNA, 195 bp, Homo sapiens
  misc_feature (1)...(195): n = A,T,C or G
gggctgctccgttgaaaagaacatatggaggcctgtgcgcagtncaacgcatttttgtngngcctgcatgcccttacagaaagtctcattgactggncattttgnctttgncttgtggnctttnccatgaaaagaaacattgtttgatgtaagtttgttgcaaaacantaaaaggagtagcaggaagttgtattt

SEQ ID NO: 3134 - DNA, 195 bp, Homo sapiens
  misc_feature (1)...(195): n = A,T,C or G
ctggctggttcttctgtnccacttctggtantccttnctacgcgnngtggaacattcggttctctggacagtnccttccttacagntgtaggaacatggncagcgtacagggaactggaagtcaaaggnaccttgnaaaaccattcacaatgaactgtctnacattncaactttgcaaatccaaacatagtcagc

SEQ ID NO: 3135 - DNA, 194 bp, Homo sapiens
  misc_feature (1)...(194): n = A,T,C or G
gtcagaggtgctagcgggcccccatcccacgtcaagatgttctcaaagttgctggactggaatttcacggtgttgaaggagaccggatgtgtccacagtggtgtgagctgcaggaggtggaagcagatgctganaanggaacccaggtctctgacatccataggtgagcactccncancatgagcgtccagcct

SEQ ID NO: 3136 - DNA, 193 bp, Homo sapiens
  misc_feature (1)...(193): n = A,T,C or G
acacgtacttctatggtgaggcactgcatgggacatacattatctanagtaaaaggaaactaccaggtgnacangcagggtgtngtggtgcttnaagaagnangttggtnnngggggtggtacagcgactaccatgatgagaacatgtcactacagccagtcttttatgtacccacatcggtcaagaaaaaga

SEQ ID NO: 3137 - DNA, 193 bp, Homo sapiens
  misc_feature (1)...(193): n = A,T,C or G
agtaacaaccccagaaatatttggcgggnaggaggnaacatgggcaccagcacctttcgttcagggactttcaatatgnatgggaggcagaggnaagnagggttgtctatgantctacatagtcctgtaagggaaaactntgttcataacaagnttggccagcttccttgngattcctgcgctcttcggcctg

SEQ ID NO: 3138 - DNA, 192 bp, Homo sapiens
  misc_feature (1)...(192): n = A,T,C or G
aactgaggacagcagtgcgttcaaggccagcgcctgcctcaccaccctcacaaggcacggcnaaccacccaaagctgcaggaggacaggcagcaacgtctcacacccttcccttcccattccatctgggatggatttgttcttaaagattttcatattagtaaaaagtgctttaccactttctataaaacat

SEQ ID NO: 3139 - DNA, 192 bp, Homo sapiens
  misc_feature (1)...(192): n = A,T,C or G
ggaagctacaaaaccgttgggcaatgaagatangaanccctgagangcgctacccttncttgggaaaaccaggaaactntgtcgcctgccttcntcctanatanntgnctatacaccaaagtgcntgcttcngactttgaaaatnatnnatgcaaccacaggctgatgagtcanacaaaccttttgatggca

SEQ ID NO: 3140 - DNA, 192 bp, Homo sapiens
  misc_feature (1)...(192): n = A,T,C or G
tggagtcttacatacttgangcggnattagtatgntntcaaaacngctcncancatgggtcagctcaaaaagggngagccacgttttacttaaacngacggangactctngncaacaagggagctgtatnaggaaaatgagtcccgacgaaanaggaatgaatttnncgttaataaagtaatttatttttca

SEQ ID NO: 3141 - DNA, 192 bp, Homo sapiens
  misc_feature (1)...(192): n = A,T,C or G
acagcgcatatatggcctgccacttcctgtcctctacttnganctgcntagatgcctgcncgcacnagggccatngggcngganaatgtctacttaaactatttgaaagtggtggngccgggggnnnctcactttgtngcnngcttacctaaaatgcataatagatagcagtgcataagtgaaaaaaaaaaa

SEQ ID NO: 3142 - DNA, 192 bp, Homo sapiens
  misc_feature (1)...(192): n = A,T,C or G
ggggtgctccctgtgnccccgtgtgctgggngaacaacagnnaacttgtagnatgggttctctcctgtcatgcgaatcctgacaatcaaactgatcatcaggctggcagcaacatgctttgaccagctgagccatcgcatgcattgggtgttttatttaaaaagatagaggaaagtgcctgaaaaaaaaaaa

SEQ ID NO: 3143 - DNA, 191 bp, Homo sapiens
  misc_feature (1)...(191): n = A,T,C or G
aacattgggctgtaggncagtactgtagtcaatggtagccagccaactgtaggactggaancctttgggttctagggagccatgtcaagtctttccttatcttcacgtatttggtcacagcancaaaatgctaagggagacatcccctcttganccttactaatattttagttttcaccacacttaaaact

SEQ ID NO: 3144 - DNA, 189 bp, Homo sapiens
  misc_feature (1)...(189): n = A,T,C or G
gactgagctcaaaagccatggaagcaacgggtagcccctganaatcccctggcaacaggatggagaatgaactagatagaagcgtntgtgaccacggactaccctgtttacagcacgccacattttaaaagatactgcaatccaaanggaaaggcctgccttcaagactcttagaggaaaaaaagaaat

SEQ ID NO: 3145 - DNA, 189 bp, Homo sapiens
  misc_feature (1)...(189): n = A,T,C or G
accacgcctgcctttcccaacncaccactgtggtagcactaagaatttgggnaagnaggtagtgagtgcttctcgggctctccatccaggcaataccatgtnggtgctgngggtnnggggaatctcggatcttgaaagaanaacccancatgttntcagccttcaagtcaagactgctcggggaagtga

SEQ ID NO: 3146 - DNA, 189 bp, Homo sapiens
  misc_feature (1)...(189): n = A,T,C or G
cccaaagtaacctttcccctgttcctnccttcttcgctttanaaaaaaccagggcagtggcggnggcttttacaggaatggctncagnactggcaagaaaaacttttcttcttagtncttatgnngggtgggaattttaaatactngtgntttaaggaggttaacataatnaatggaaaaaaacccttt

SEQ ID NO: 3147 - DNA, 189 bp, Homo sapiens
  misc_feature (1)...(189): n = A,T,C or G
ggataggtatcccgggnccgtccccacaannaacacttncccctgttcctaccttcttcgctttaangagaaaaccaggtcagtgcggtgcttttcagaaatgcttcagtactgctaagnaaaacttttcttcttagtnctatgttgtgggaattttaaatctgnctttaagnagttaaataataatgg

SEQ ID NO: 3148 - DNA, 189 bp, Homo sapiens
  misc_feature (1)...(189): n = A,T,C or G
gtgcataactgtgaaatacaacactaagnancacctgtatggttaaggtcaaggcagtagtctcacaaaggtatccagcaccttgttgtgaaatttcaanaggaatannaactttgctcttaacnngagacnctgggagaaggtacnacaacccntaatgngngnntntctggtaaatacaccacaggg

SEQ ID NO: 3149 - DNA, 188 bp, Homo sapiens
  misc_feature (1)...(188): n = A,T,C or G
actgaggtctaccgannnatcatcaaaggttggtcgcaatggcagaggctgcaacagtttgaatgtgtcctttaaagcttgcatgttggaaatgtaatccccccactgaagagggcctttgtcctcatgagtgaatgaatgccatgttctctgtaatgagttaagattaaatcaattttgccattgta

SEQ ID NO: 3150 - DNA, 187 bp, Homo sapiens
  misc_feature (1)...(187): n = A,T,C or G
ggtcatgatgcagggcaaaangtncgantcgattggtggccctgncacatagaccttgcaggccaaccgagccctgatcgcaggatgtgcatcctgcatgagccgcccttcgaggcgtccgtcgtggatgctcgtagngcggcccagtgtanccaanatgcgtacaaagangaagacgggcaaggcc

SEQ ID NO: 3151 - DNA, 187 bp, Homo sapiens
  misc_feature (1)...(187): n = A,T,C or G
cggtttgtttgtttgtttgtttcttcttctttattagncggattggatttgggaaaaangtagctnaattctattgttgattatattcacaaacaaaagactgtttatatgtccctgaattttggcaagattctttccnatattncttnagacccatannagnagcaagcttagcggcccttttgcc

SEQ ID NO: 3152 - DNA, 186 bp, Homo sapiens
  misc_feature (1)...(186): n = A,T,C or G
cctctctttcactcgtagagngctnctcagaaagttttncacanatgctcacaggcagaacccatccatgggctcgagnctgcacaactcatactctgtcaacaagaatcctagtactcctccctctgtactnggtngtgtcctngaagacangcctacatgctcgtacttacatataataaataa

SEQ ID NO: 3153 - DNA, 186 bp, Homo sapiens
  misc_feature (1)...(186): n = A,T,C or G
gcttctctgtgcagcgcctgnctctcctggattnactctgtggatcaggctgtncttgnactcaaagacctgcctgcctctacttccagagtactgggattaanggaatgagccaccacaccctacccnattaaaaatatttttaataaattctccaactctgggcctggagagatggcccagtgg

SEQ ID NO: 3154 - DNA, 186 bp, Homo sapiens
  misc_feature (1)...(186): n = A,T,C or G
gtggaaaaccagtatcttgtggngcactggnaagaaggcctctggtctacagggcctccacctgngtcctccccattcctntccctggtgactcccagcctgaaagaagccaggaggactttgtcatctgnctaccctgnngtaccttagtcctttaaatgagtgnntaaagcttgctaaatctca

SEQ ID NO: 3155 - DNA, 185 bp, Homo sapiens
  misc_feature (1)...(185): n = A,T,C or G
accatggccatggcccatgggnaaaaggnaacttccagnatacaggacagtggcaaaattgaagggtcgccattagcaancggngcagnaanaagcttgctgcccgggggctgaggggatccatggnctcncaangnaggnttggcagatacacggcncggntttgcagggcatcatacaccttc

SEQ ID NO: 3156 - DNA, 184 bp, Homo sapiens
  misc_feature (1)...(184): n = A,T,C or G
gcacacaaaccattatgngaccgtganacanggatcgacttnccaatctcggttccatnnncttgtggccttgccaanatacatanatcncttatntaaggcaaccgtnacaccctgcaacgtgttcaggnaggagatntagtctcccctcccccatcctgaatccctggttgcttggggtgga

SEQ ID NO: 3157 - DNA, 184 bp, Homo sapiens
  misc_feature (1)...(184): n = A,T,C or G
aacagcatctgatctactgngccatctctacagccccactcttttctttttganncanggtctccatagcattacgcatgncnanncancngcctcanactttcanatgctgaaactaaaantatatgctnnggngctcggctctcaacatgtgntgggatgaaaggaatatgctacgcgtgta

SEQ ID NO: 3158 - DNA, 184 bp, Homo sapiens
  misc_feature (1)...(184): n = A,T,C or G
tgagctagctctacccctgggaatggnncctcagtggacaagtccttctatctcancataaccaagataaccacccactggcatgcccagggattctcgattctgacaacagtaaccaccangatgccatctctatttctgncccagtttcttttcctgtngctgnaataaattaccctgggaa

SEQ ID NO: 3159 - DNA, 184 bp, Homo sapiens
  misc_feature (1)...(184): n = A,T,C or G
cagaagatcggtagttgaantacatcccagcaacatagccctgggttacatggccatggactcaaaaaagcttaatcatgaagcagcatgcttcctgcaatggttcctttctgatgaaaggataaaaagtcaattgacaggattcctgcttccttagntggaaagaaaactcttttatgctgag

SEQ ID NO: 3160 - DNA, 184 bp, Homo sapiens
  misc_feature (1)...(184): n = A,T,C or G
tgacctgggtgcttttcnagactcggccnnccgtaccctggaggaaaganggcttgncnccnacagtcctcaantannccntgtgatntcatggctgangcntagaaaacatttgngcccatgnctgagaacattnataangccataatcgataagaactctggaagctctggaaaaaaaaaaa

SEQ ID NO: 3161 - DNA, 183 bp, Homo sapiens
  misc_feature (1)...(183): n = A,T,C or G
gcgggcgcgtttacaanncgctcacaactgnaagaaancatttctctagctctatgggtggaggagacttgaaannncgttttannagttcaancataatgaagcaaacccanttanccgntngancctactttnatnaaccaanatgggctttgggggggccccaggcttccagacgttaga

SEQ ID NO: 3162 - DNA, 182 bp, Homo sapiens
actgagacaaactaaacgtgtttaaattgctgagtactcagcaagttcatttagccacagaaaacacacttccaagctacagcagtcacctacaaatgaaggaaagcagcgtgaagccttgtgattgagcctggaaaccaagcacagatggccaaaccaggacatatacctaaaaaaaaaaa

SEQ ID NO: 3163 - DNA, 181 bp, Homo sapiens
  misc_feature (1)...(181): n = A,T,C or G
tgccccctctcacagggntgnttctccccnttcgngaacacttgacttttggnaccccaggatggccaccgacttccnggttgtanggttantttgggaagggggttttcccanaattgncctttaaanccccaattncntttagagttnggtggnttggncccnaaagggccccccaaaa

SEQ ID NO: 3164 - DNA, 180 bp, Homo sapiens
  misc_feature (1)...(180): n = A,T,C or G
gttggtttgcctcccaatgncaggatctggggggctttatagcagagaatttcagtccaacgaaaggtaacattnancttggtgcctttcnagtttcaaggcaccagctcnccancaaatattntnccgannacgcttagggccantaaatgngagatgttggaccccaaatgatgtatg

SEQ ID NO: 3165 - DNA, 179 bp, Homo sapiens
  misc_feature (1)...(179): n = A,T,C or G
ggcagattgactgatgccagctctgggcagcgacagagggtaagcctggaacattgtgtcttcccagcacaggaaagggtcatgggtgaacgatgcagaggccagggtaaacagccaaatatgaagtagcctaagcatccacannggtaataaatgcagcaggtccaagcaaaaaaaaa

SEQ ID NO: 3166 - DNA, 179 bp, Homo sapiens
  misc_feature (1)...(179): n = A,T,C or G
gcctcacccctgaggattaaggntggctagaattcaccgtntnacacaacataaanaagagctggntggaggcggttcanactatgnaatcccagcnctcactgaggctgaggcacganggttgactagagntncaggacccttcttgaattacnggggatagacctttgccatcaagg

SEQ ID NO: 3167 - DNA, 178 bp, Homo sapiens
actgaggggcctaacttatgctggagtgtggtgacctgaggctaacttgaagatgaagccagacaccagagatctcaatgtactgtaagctccgtggtcctatctgaaccacaggagaactgtctagtctgtttatgcattaatcttcttaatatagtccctcccaacacaaaaaaaa

SEQ ID NO: 3168 - DNA, 178 bp, Homo sapiens
  misc_feature (1)...(178): n = A,T,C or G
tccgggccgtacccacattnaccttcccctgtcctcctnttcgcttaagagnaaaccaggcngctgcggngctttacagcaatgctcanaactgcaacanaactttctctagtatatgtngtggaattnnaaatcctgtttcaagagttnnataataanggaaaaaaaccctttaaac

SEQ ID NO: 3169 - DNA, 178 bp, Homo sapiens
  misc_feature (1)...(178): n = A,T,C or G
agttattctgagcttanngggcttttctaagctctcccagtaangatggaggaagaagtgggtgctggctcananaggagaaattcaagtccagacccatgnagtctccatgnccctncagctctgcantggcttttnnactctnatnctnttaagcaagactgtcaacacttggggg

SEQ ID NO: 3170 - DNA, 178 bp, Homo sapiens
  misc_feature (1)...(178): n = A,T,C or G
cctgtgcaagctgtattntgcacaaggtgtgcctgnngcctgctggcngaaatctctgggactnattagaacagtaccagngcacnggnccnncnaggatggatggcttgnggngtaaaggtgcctgctacagagccctgaggatgccactccntcccctggcaacccacacggtgga

SEQ ID NO: 3171 - DNA, 177 bp, Homo sapiens
tgagtttaggaataaaaagtacaaaagaagtactggttaaaatgcatccctacaaggacaaagatgcctgaatcaagtcaaagaggtaagccatcatgtttcctttttttgttttgtttttaagttgctagattgtgtatgaataacatggatataattacaatattaaaaaaaaaa

SEQ ID NO: 3172 - DNA, 177 bp, Homo sapiens
  misc_feature (1)...(177): n = A,T,C or G
cccctgtgccttccttcttcgctttannaggaaaccagggcagtggcggtgcttttacagtaatgctcagtactggcaaggaaaacttttctccttaatactcatgntgngggaattttnaaatcctgttnttgaaggagntaanataatnaatggaaaaaaacccttttaaacact

SEQ ID NO: 3173 - DNA, 177 bp, Homo sapiens
  misc_feature (1)...(177): n = A,T,C or G
taaacgcttgccccttgtccctgccttctgcgcttcaaacancaaaccagggcagngcggtnggctttcannaaggaatgncttnaagnacttggnaanaaaaacttttnttctnagnccttatggtgntgggggtaatatttaaatnctcgttttaaggagttcaaataattcatg

SEQ ID NO: 3174 - DNA, 177 bp, Homo sapiens
  misc_feature (1)...(177): n = A,T,C or G
tgtggtgttttagtggctggtgtttaccgtgntgcagtgggcaanctgnncgtggtgccagtaaanttcgnttcctggtcancagnaaaacgggcagtgacctctgcatgggtagtatacatgttcccagnaacaggcaggacaaggtacttacatggggaagctcaaaaaaaaaaa

SEQ ID NO: 3175 - DNA, 176 bp, Homo sapiens
  misc_feature (1)...(176): n = A,T,C or G
ccaatcggactcacgtaagcngacgcncnacgtactcatccgctangaatgcaggagcttgcacgcccctcattcatggngggattgtgctggcacggaccggatnctagccnttactgcaggattnttggacancccanttaatnctggatgctgctnttgaagcacagtctaca

SEQ ID NO: 3176 - DNA, 175 bp, Homo sapiens
  misc_feature (1)...(175): n = A,T,C or G
ccgactccggtggctttgggattaaangtgtttncnaccacatncggaccanccataganttttgcagcaactacagactaacatgatctcaaaatttttgctgacnaacagggacaacaccgcgcncgtttaaattncncaataaaagntggtcctctcaaagcccttggtggg

SEQ ID NO: 3177 - DNA, 175 bp, Homo sapiens
  misc_feature (1)...(175): n = A,T,C or G
gactgaggttaaaagcaagatggcccagcgggcaaaggcacttgccactacagtgacccataggctgaagatgagaagacactcccacaaagtngttctctgtcctcacttaggtgtgccaaggcgcacctgtagctccacacatatatacataaacatatgcacataaaataga

SEQ ID NO: 3178 - DNA, 175 bp, Homo sapiens
  misc_feature (1)...(175): n = A,T,C or G
ccgacctcctacctgangtgngaagannggcnntaccacaccctgaggctctctctgtnaccactggntttcttggtctgtcacacactgacancnactttcaagcncaaaccacatntttatntttgncttttgggttttctggatataaatagtcttttctgaaaaaaaaaaa

SEQ ID NO: 3179 - DNA, 175 bp, Homo sapiens
  misc_feature (1)...(175): n = A,T,C or G
gattgcgacatacatgtgtgttgtgatgctaaaaaccgancctnactgaatataaatttaacnnccatnannacatggtatccttggngntntntatggnttgaactttgggaactgtgctngtatnancatgcttaactttcagaatataaacttatggctctaaaaaaattgg

SEQ ID NO: 3180 - DNA, 174 bp, Homo sapiens
  misc_feature (1)...(174): n = A,T,C or G
caaacattattaaacaacttccacgtgtccaacaacaacccctnctngcnaagtgaaagagaaggccatatgancaaatgtggcctggctggtgggaaaaccanaggagtagagntttaaccttgntctgatcctgtcttcagtgtttttagccttgncctgtgtgttaataaa

SEQ ID NO: 3181 - DNA, 174 bp, Homo sapiens
gaggctctgcagagggaccaataaaagtgaagcaaagaatcctagcacgaggataaaccatccaaacagatttcaacagcctggatcaggccttgcctgcaagccgcaatagctcagggccttttgtcctgacagcgtaataaatgtctttactgttctgggcaaaaaaaaaaa

SEQ ID NO: 3182 - DNA, 174 bp, Homo sapiens
  misc_feature (1)...(174): n = A,T,C or G
atcgaggaatactttaagtgcangaaatatataaattatggctgacattcaagatatanacaagangacgncngggaatagccctcacagaccgtgttncananacaaagganngacttgggaaggcagcctgaagttctccgnggagatggagaacttggaaacactgggctg

SEQ ID NO: 3183 - DNA, 174 bp, Homo sapiens
  misc_feature (1)...(174): n = A,T,C or G
cagcttacgcttgctnttgtaatgtgaantccttncaancacngcctgtgtgacctaacataacacnnggctgtgtagaagagacangcccggcaagttgccttggggggaaaatgcttgaacatgtatnntgctccattttactaacccgtctacattggcgaaaactaacag

SEQ ID NO: 3184 - DNA, 173 bp, Homo sapiens
  misc_feature (1)...(173): n = A,T,C or G
caaaaccgatctgctacacggntatnntganaggaccgctacactgnccnncacttactnnccctttgtcttntnaacnatgnaaananccaccattttaggaacagcattcntgaagtggctagctaccaccttgcaataaagttttcctggcagtgccccaaaaaaaaaaa

SEQ ID NO: 3185 - DNA, 173 bp, Homo sapiens
  misc_feature (1)...(173): n = A,T,C or G
ccaatacggggagagcggtggcncggganaaaattnccttnntgagnaggacattttcatacggcnaatgtnccgnagcgtttgggggcaaatgaactccagggncanggcatgggnaaaagcaagtactcgnactcttcagcctgtttggacaagtataaaggggaggtcag

SEQ ID NO: 3186 - DNA, 173 bp, Homo sapiens
  misc_feature (1)...(173): n = A,T,C or G
aacagagatcaccctgcctnngactnctgggntgctgncattangaggtattcaacaccataaaancaatgaaaagnatagnacacatgtntnaggncnttatctaactaancactgnaaaggcngnagttgccttaggcagagcctagaaatcctttccagtttggcccctt

SEQ ID NO: 3187 - DNA, 173 bp, Homo sapiens
  misc_feature (1)...(173): n = A,T,C or G
acgctcgagtggtcatntgccngcatccactgcgatggttcccagacntccgaaactncagttcnnggcaancaaagcatcatcttctggcctctgaaggcacctaggcccacacntggagcacaaacatncnttcnggcctaggcacccatccntatacattaaataaaata

SEQ ID NO: 3188 - DNA, 172 bp, Homo sapiens
  misc_feature (1)...(172): n = A,T,C or G
ttttatgaagtaaaatcccctgttttntanttacacataaaacagcccctcaataggtggcacagggnacattttncaggaacagtcggctcanaanggaacngggtaagcctctctctacacttcaagctgcctgactcagtccttactggtactttagccccacccctgg

SEQ ID NO: 3189 - DNA, 172 bp, Homo sapiens
  misc_feature (1)...(172): n = A,T,C or G
actgaggtcagaggcggaggccgagggaggntccgggccgaaccncaggggcggggctcnagcctgcnttgcattcnnacanagaccgncaggcctcgntcnanaggntgctagggacgggcagaacngctnnatctacaagagtgggaggcgtgacttgaaacaccgtaca

SEQ ID NO: 3190 - DNA, 172 bp, Homo sapiens
  misc_feature (1)...(172): n = A,T,C or G
ctgccctttggaattcaaacgggaagccgctttggactgactggctgacttnctcctcctccccctcctcccccttctgcttcagattnatttattatatgnaagnacactgnancagttgtnggacacacttanacgagggcaccagatctcattgtgggtggttgtgaac

SEQ ID NO: 3191 - DNA, 171 bp, Homo sapiens
  misc_feature (1)...(171): n = A,T,C or G
aaggtccttatatgtgttatggttgagatnggtcaagtcagcctgagcccccctactgnatcntncctantgncttgctaannaaatgcccaacaaccacntgggnggntcacaaccanttctaccaagagngggactccctcctctaggagtggctcgaagacaaactac

SEQ ID NO: 3192 - DNA, 170 bp, Homo sapiens
gactgaggaaggaatgagaaccacatgcaaatactacaggaataaggctggctcttctttgcaaaaattatggagagacaacgatacatttcttcaatttatgaaaaaaaactgcatcaaacaagtcaaatgaaccacataggatttaaagaggtcagaggaataaagtt

SEQ ID NO: 3193 - DNA, 170 bp, Homo sapiens
  misc_feature (1)...(170): n = A,T,C or G
tgaactcttgcccctgttccttcctnctncgcttnaagggnaaacgcaggacagtgcngtgcttttcangaatggctcannactgggaagnaaaactttncttctantctatgntgtggnaattttaaatctgttttaatagttctaatantantgtaaaaaaacccttt

SEQ ID NO: 3194 - DNA, 170 bp, Homo sapiens
  misc_feature (1)...(170): n = A,T,C or G
agtgctgtgtccaggnngatncatggaattcaaggctctgggncttgtggagagactggnccntcttntagtaatagaagnnnccccccntgcccnagggatnangaactctaacctgnactgggatacgctgttgtcgatgggtttnagggatttacctgaggccaaaa

SEQ ID NO: 3195 - DNA, 170 bp, Homo sapiens
  misc_feature (1)...(170): n = A,T,C or G
ctgcaccctgaactgnacttaancactgggtgtactcttacntccttgggctgcantctcctctccgcangcaacagcaagngaacatgccactcanttccaaaatnttgtgagaaactttngngagaagtntagtnccnggatcccgagagggcagtggagaagacggg

SEQ ID NO: 3196 - DNA, 169 bp, Homo sapiens
  misc_feature (1)...(169): n = A,T,C or G
tagccttgggcgcccagtgaggtgnggctggangggcctggcacacccgtccctggngaggggacatgnctntctgcctcccactttgccctcatcactgnctacgntngacatnngggtgaggctacgaggcctgncntagggagaatgccaccctccgccgttgcct

SEQ ID NO: 3197 - DNA, 168 bp, Homo sapiens
gactgagggaaaggacacaggtctggtagtaagagtggtgcggtctatgaaggggattggaagtttgggaagcgagatggttatggatccctcagtcatcctgacccagagaccggaaaactcaggagagtgtattcaggctggtggaaaggcgataagaaatcaggg

SEQ ID NO: 3198 - DNA, 168 bp, Homo sapiens
  misc_feature (1)...(168): n = A,T,C or G
cactgcctccttctggatannccccaggaagacctgtgggtntngcttcaattctntgnaggaaaataacaggccanctattttggtgacannggactntagggntgacttctgtcancngaggcaggcancagttgtagntgnagcaagaaggcataggcaattcct

SEQ ID NO: 3199 - DNA, 168 bp, Homo sapiens
  misc_feature (1)...(168): n = A,T,C or G
tgcagtaggcactctnagtaacacaggngtaaccagctgnngggaatttgttcccctttgtattccttataacacgggagcctgggaatctcacaagtagccaatgaaatgcatccctctctgcctttgtctatcatccaataaatatttatggtgtaaaaaaaaaaa

SEQ ID NO: 3200 - DNA, 167 bp, Homo sapiens
  misc_feature (1)...(167): n = A,T,C or G
cttgggcttgctgcctgctctgtacttgccggcaccactggtntacngnncatgggccacntccagtgtttttgtgnctaactgtnngactgaacccactanataccttatgccnggnctngntcaactgnacancattgctagcanctccttgtaatgatgagtgt

SEQ ID NO: 3201 - DNA, 166 bp, Homo sapiens
  misc_feature (1)...(166): n = A,T,C or G
aacccttttctttggcaatgagggnaactacaaagnaaccaaatataattctgaaattcaggnatctgtattttgagatggttttattttcagaatgaaaagtatatatggttatctttatgaatgtaaagacatgagaaaagagttatgatggcaaaaaaaaaaa

SEQ ID NO: 3202 - DNA, 166 bp, Homo sapiens
  misc_feature (1)...(166): n = A,T,C or G
ggtggttgtcccaactctgtntacgcacaacaaaccctnacaccatgcacgaggtgcattgtgaaccgnttcacatnnaaaccacatacnacagggaaaggcnatnggnagnnantanggctgggnagaatgntggccnctggaagggacttgtttggttgttcag

SEQ ID NO: 3203 - DNA, 166 bp, Homo sapiens
  misc_feature (1)...(166): n = A,T,C or G
gaggaggaggaggaggaggancgnataggaggangaaagatcaggggtccaaggttgncctntggatgtgnntgncaatgaccttgacgntctgattcttcnacattccncctcccaattagctggcattgcaggncgcacaccantacatatccatattttatgc

SEQ ID NO: 3204 - DNA, 166 bp, Homo sapiens
  misc_feature (1)...(166): n = A,T,C or G
gtcaccttatgctaaaatnggcttggtggcgntaggctagttagctcnattgtctcttcnactctggggnngggacgatctaanacaaaaggccgttatncngtaaaaacnagngggcgacntntgaaagattgtggcnacnccccgggnaccaaaaaaattctct

SEQ ID NO: 3205 - DNA, 166 bp, Homo sapiens
  misc_feature (1)...(166): n = A,T,C or G
ctaatgatggagcctgnattaaggccangtatgtgggctcgaagcactaaggaagaatgcatgntctaggttctannagagacctncatntcnncaaacaangnggtcaancagtagnanaagcaagcagacagtagcaacaacagcaaaaatagaaaattactaa

SEQ ID NO: 3206 - DNA, 164 bp, Homo sapiens
  misc_feature (1)...(164): n = A,T,C or G
gaactgagggtttctntgggnaggagctccttgctgctctggtanctcactctgcnnaccacggttggcctggaactcacaaaagtggtgggattaanggcatgcaccacngctggccagcctcatttnaactnttaaaaaaagagacaataggtcatgagctg

SEQ ID NO: 3207 - DNA, 163 bp, Homo sapiens
  misc_feature (1)...(163): n = A,T,C or G
ttccggggccgtacccaccngngacgcttgcnccngtcctgccttttcgnttcaagcancaaaccacgcagngcnntgctnntanaggaatgcntaggactggcanacaaaacttttattcttagaactatggnnaggggtaaatttaaatactctttttaag

SEQ ID NO: 3208 - DNA, 162 bp, Homo sapiens
  misc_feature (1)...(162): n = A,T,C or G
atgtcttcggcatcctgatgacgtcagagactctgagaggctgcggtcccnggtnttggatgatgccctttctaccgagggagncaacccggcngcctccttncatncatcgcnntctagacactgtcatgatttagagttataaacattatttctttatag

SEQ ID NO: 3209 - DNA, 161 bp, Homo sapiens
  misc_feature (1)...(161): n = A,T,C or G
gaatccgttacgcttactgaaaagtttggatgancggcccccagataaatngagaaagcgaagaaagttcatctcactnctaaagcaacaatttggggggnggngtggcctgtgattagcatncgcttcccatagncatattattagctcagcgctgacga

SEQ ID NO: 3210 - DNA, 161 bp, Homo sapiens
  misc_feature (1)...(161): n = A,T,C or G
cgctttttcttgactgtggtgacttgcancatcctaccagcacatatcagtgatgataatnatcagggcatcctgccacatatgtnctgtnactgctcctgccaccatgccaatgctctgnncatnttntttcctcggaagcacagacagaagtacccgtc

SEQ ID NO: 3211 - DNA, 161 bp, Homo sapiens
  misc_feature (1)...(161): n = A,T,C or G
tggggggcatgaacagcataatggaccaggctaagcttgngccanggaagctgctacctgnttnggcgggacgcccagctccaccagggcatttncacgggcccnacccattatnttgaagcccaccccctgacaancaaaacacttgggaaaaaaaaaaa

SEQ ID NO: 3212 - DNA, 161 bp, Homo sapiens
  misc_feature (1)...(161): n = A,T,C or G
ccctgttgctatcccaactctactgatgtcatctgtgctgggctgctagtgtatctgtgnagtgtntgcgaatagtatcaagctgccgctgatgacttgtgaagngaactgctgatttccagnacaacgcnacggggagttgctccaaaaggaacctttcc

SEQ ID NO: 3213 - DNA, 160 bp, Homo sapiens
  misc_feature (1)...(160): n = A,T,C or G
acagcctgagcagacngccatcnctgaaaccngncngnatnatggngctgnctngatanctggaaacctgnccactacaactgctgancacagnaagaaatcangccacatcttctgctgctctgtttcctgaaggcctaattttgtgtcatgcatcttt

SEQ ID NO: 3214 - DNA, 160 bp, Homo sapiens
  misc_feature (1)...(160): n = A,T,C or G
tgacctacgtgacctctgncctgagtacctanggtgnctacancttcgcctgggttcttgcccnanagcctancttgtcttcttgttggnnctcaccctgcgngtgctggtctcagcccagtatcacctgtcntaggaccagntgagcccatcctggcca

SEQ ID NO: 3215 - DNA, 159 bp, Homo sapiens
  misc_feature (1)...(159): n = A,T,C or G
cagagatgatcttctactaaatnccaccccacccccatccccgggcnagcccntggatgaccctttttcccttaactgtcaaatgatgagaaagcacggcttaggacatgngacaggnganacagatcctggnaggctcgggggagggggggggtcagg

SEQ ID NO: 3216 - DNA, 159 bp, Homo sapiens
  misc_feature (1)...(159): n = A,T,C or G
ggacgatgtgggacaatgaaanagagccgcnganaggccttgctttcacttacattngactgtggctttcctgnggcacgtcagcagaacaacgcacgggaagncngntctctncttccatcacgtgggaagactgaaccaggttatcaggcttggggg

SEQ ID NO: 3217 - DNA, 158 bp, Homo sapiens
  misc_feature (1)...(158): n = A,T,C or G
agaccccgtgtgtgataattatctcctggcacagaaagggtgccctcagattcttcaccccgcacgccataccccagccttattcccccaccctccgaagcaacaacatttatctttgagtttcntgtctttctattaagtagtgaaccatgaactca

SEQ ID NO: 3218 - DNA, 158 bp, Homo sapiens
  misc_feature (1)...(158): n = A,T,C or G
acaccaggagccctgcaaactgggaattatagtaagactgtggaggccaccatttgagtgctgggaactggaatctagttcctctccaagnaacagcaagtccctggcccatctgagttcctgtcctgattttcctcagtgatggattgatgtggaac

SEQ ID NO: 3219 - DNA, 157 bp, Homo sapiens
  misc_feature (1)...(157): n = A,T,C or G
cctcaattggcaagacatctgcccgtgaggagctcatgcccctaagcaatccnatataagcnactgcccttcgtgccancgttnactgccatntgcncncaggagcagaggcnaccntccctgtnttngactcatccatancctggacccgccaata

SEQ ID NO: 3220 - DNA, 157 bp, Homo sapiens
  misc_feature (1)...(157): n = A,T,C or G
tattgtggaatggaaatgnacccctntccttgcaganacctangctntgggaaacagnctctgaaagtaccacntcttgcntgnctgaaaaanccatggagaaaacaatacatncgaggatgaacaggctggttnnagggatacaaacacccccacg

SEQ ID NO: 3221 - DNA, 157 bp, Homo sapiens
  misc_feature (1)...(157): n = A,T,C or G
gagggtggaggccagncctgggtgtactccnntggcaggtcctgtccttactggcctctcggttcccacgacactcagtctcaacgacctgcaccttcccgcgcctgggcccgaagtgagcaaagtcaatgaaaagtttcaccctcaaaaaaaaaaa

SEQ ID NO: 3222 - DNA, 156 bp, Homo sapiens
  misc_feature (1)...(156): n = A,T,C or G
tccgcaatgcaaaacattgctatggctttcggccgcggcagccatcttncantaactcgccaaaangcaggnaacacanngggtaagaggagcaggcaccccggtgtacattntntaggncttttaggaaanatggnattgttcctttggccacat

SEQ ID NO: 3223 - DNA, 156 bp, Homo sapiens
  misc_feature (1)...(156): n = A,T,C or G
ggactactcatcttagagctgtnaccgtgggaaacactccnactgtaactccccaanctnctccctcttggntgggtctatgnccggggnggngccccanggatcccctggnactaaatgttcntgcaaagatctgganacaggacttttttgggg

SEQ ID NO: 3224 - DNA, 155 bp, Homo sapiens
  misc_feature (1)...(155): n = A,T,C or G
tgcggtacccccctgtggtaacgctcctgcccttcctccctcctttantttgatgtntattaaangtacgnnttcnccttacctgccagaaaaggannngaggaggccggaacagctgtgcaggacccttcagtgttaccggaaaaataaaaccg

SEQ ID NO: 3225 - DNA, 155 bp, Homo sapiens
  misc_feature (1)...(155): n = A,T,C or G
caacgacttgacaaaacaggtaataaactctcnttaccgccgngtcagctggatgacgcacaccttgtaatcccnggcantcgggaaggcngagtgcaggcggatttttgagttcgaggccaggcctgacactacanagtgagtttgccagggct

SEQ ID NO: 3226 - DNA, 155 bp, Homo sapiens
  misc_feature (1)...(155): n = A,T,C or G
gagttgcctcatctgccttcgttnttacaangctggnggcctacaacatnataacagtattaaaaacgaacctgcagggaaacagccattcaantagggggatgtcacgttcaactaggtcctanaggaaagcaagaagtagcaatgacacctta

SEQ ID NO: 3227 - DNA, 155 bp, Homo sapiens
  misc_feature (1)...(155): n = A,T,C or G
ctctcactgggacttgaganacgaggganccntacttgtattanctacanatgtatgagagagctactnngtgtaaaccgtattccaatanctcttcaatgntgaaaatggtnctgaaaataaaacaggacaggatttttattgaaaaaaaaaaa

SEQ ID NO: 3228 - DNA, 154 bp, Homo sapiens
  misc_feature (1)...(154): n = A,T,C or G
gctcaaactggctacagttaaagggaggaagnngcctatnnnactgaggaaaanganctacngaggnatggttctgtcctttggaaaaagacnagatggggccngggcnagtntctgaaacatgtattgnntcacttacctaaaaacagtggga

SEQ ID NO: 3229 - DNA, 154 bp, Homo sapiens
  misc_feature (1)...(154): n = A,T,C or G
tgccaccatcatcctgcnagaanaatttaatattagggagacctatgacattactgacatggtagacaacanggataagggtgtatttattatgaaagcaaaagttacatgacatcttatttctatcaaaataaaatataaaagtattttaaat

SEQ ID NO: 3230 - DNA, 153 bp, Homo sapiens
  misc_feature (1)...(153): n = A,T,C or G
acaaactgctcagaacatggggaagtagnaagaacatggtaaatgcacaccaattccagcacttgggnaggcagtaggacagctaggcnctgtgcagcaggttccaggtcagccagggcccacagnagagtctntgtctcaaaaaacaaaaca

SEQ ID NO: 3231 - DNA, 153 bp, Homo sapiens
  misc_feature (1)...(153): n = A,T,C or G
acctgggtctctcagtaagtctcctgcctcaactatccaagtacctggggactgcagttttaaagtacgtgcctnaagtntcancccngacntcgcctttattgntggataggcatgaggaagtgtaaaccaagaagaacccttttcctcccc

SEQ ID NO: 3232 - DNA, 153 bp, Homo sapiens
  misc_feature (1)...(153): n = A,T,C or G
tgactacagcttgcccanacctttatgagctatgcaanacgtggtncagtcagaaggangccccagccaatgaanacgatnnatgcnggaggtnanccacgctccacatgtncatgcctcatggtgacagaaacagnggttgtggaatcaaaa

SEQ ID NO: 3233 - DNA, 153 bp, Homo sapiens
  misc_feature (1)...(153): n = A,T,C or G
gatgggggaggagggnntggggcacggtggccacctgcagcatgtggcctgcgcctggctgnnggctccccaggcanctncttttgggggcagccgnggctncacgctcaactctggagcccccaacagctttgcaggctcccaggccccggg

SEQ ID NO: 3234 - DNA, 152 bp, Homo sapiens
  misc_feature (1)...(152): n = A,T,C or G
ttaaaacccggccagcttnatcagnactccatgttgcacctntgcgggcgatgctaccatttngggggnagagggngacatccagcggtttcaaagggnctntgtatctcnactatggctcacatatngccgggacttcccaccccttgctg

SEQ ID NO: 3235 - DNA, 152 bp, Homo sapiens
  misc_feature (1)...(152): n = A,T,C or G
ggcagctagcccgaggacanggatcccggggccgtnnccacnntnaaccttgcccctgttcctcnctgctgcgcttnaagagaaaccaggcaggtgcgggtgctttacaaaaangctcaggactgggnagtaaaactttgctttagtctttg

SEQ ID NO: 3236 - DNA, 152 bp, Homo sapiens
  misc_feature (1)...(152): n = A,T,C or G
gagaacttctacgttgaccttctgctnccggggaanaantgcattccctggtgaataagacccccctttccccaaaaancaggggcactcccaanttcaaactgcttcagnaacccttgggaaataaatgtttggnaacagcaaaaaaaaaa

SEQ ID NO: 3237 - DNA, 151 bp, Homo sapiens
  misc_feature (1)...(151): n = A,T,C or G
gcactgtcctgctctcgnttaatanaaancacgcngcgcggagctntncagaatgctnagacngccanaaaactgtctctaggntatgttgcggaattttaaaccngttttaagagttaaatgtgcgtgaataaaaccctttaaacactaa

SEQ ID NO: 3238 - DNA, 151 bp, Homo sapiens
  misc_feature (1)...(151): n = A,T,C or G
gtcatggaaaagcttcacgtggcttcggacgagaacagcatnttccctancatcttgcgngggaangctgcagaagcaccaancctttgnagctgaagtacaggctaactnaggagccattgtgaangctgaaccctgggactgtgaaaaa

SEQ ID NO: 3239 - DNA, 151 bp, Homo sapiens
tgtaacaggacagaactttaccacctggaaactgctgcttcaagtttcaggatcaggcaagggaacagtacccgcaacaaccaacaacaccaaagtaagagtacacaagttgaagtacacaacacttgatctgaaacaagaagtttgtgcc

SEQ ID NO: 3240 - DNA, 150 bp, Homo sapiens
  misc_feature (1)...(150): n = A,T,C or G
tggggagtctttgtgtggnggttncactttcctttangggnttgttgcaggtgcacccgcnctacactatgtattctgggccagcctgggctacaaggagaccctgtctcaaaaataaacaacagaaaaacttaccttgaaaaaaaaaaa

SEQ ID NO: 3241 - DNA, 150 bp, Homo sapiens
  misc_feature (1)...(150): n = A,T,C or G
aagaggagcatgaggaacagccanaaagcgtacatgtgtcttgcgccnttntgnactnttgtaaggaacagccaancnnttgtctgnntnttctattataaaccagagaaaaggcnctatatttgaaagaaattgtcaaaagcaaaaaaa

SEQ ID NO: 3242 - DNA, 150 bp, Homo sapiens
  misc_feature (1)...(150): n = A,T,C or G
aaggagagcagtgcagcacgggtagcgttgactgtgcagccatccattctggtgccttgnctttccgttgntntnnanagagtctgnaacacacagcttgngtnntanagcncctgaacactgttttcattataattaaaaccacttctg

SEQ ID NO: 3243 - DNA, 150 bp, Homo sapiens
  misc_feature (1)...(150): n = A,T,C or G
ggctcttatctgctganccatnactccngcccccaagatatgggacgtctaaatttgnggatntgtttgcgtgnttacgctgtanacacggnatgatgaacagngttcaaacctaacagtaaccctntactgtgaacatgtgatttttgt

SEQ ID NO: 3244 - DNA, 150 bp, Homo sapiens
  misc_feature (1)...(150): n = A,T,C or G
gccgtctcttttgtaacagnctcactnccncggttgaaaactctgcagggaaggaangtctgcctntggaggaaaaccaaanntggngcgngatacatgntctcgggaacttcaanggaggctgaanacacccntcccttcctagaaaat

SEQ ID NO: 3245 - DNA, 150 bp, Homo sapiens
  misc_feature (1)...(150): n = A,T,C or G
ggtacttggtctaagaacctccagaaaacatgggccaagtaaacgngcttaggtgnggaggaacangcccgnnntaccagcactgagaggaagacgtttggtaactcttnagtgttctacatgactctctgnatgagacccagggcagaa

SEQ ID NO: 3246 - DNA, 149 bp, Homo sapiens
  misc_feature (1)...(149): n = A,T,C or G
tcctagttgttcatccccagatgccgtccggncaccgnaatcattatncagtcaccgnaaaaccangagcagagccagccggggtgggactgtcttcaaaagtaaaataaaaacgtaagctcttcttttgctgccctagaaaaaaaaaa

SEQ ID NO: 3247 - DNA, 149 bp, Homo sapiens
  misc_feature (1)...(149): n = A,T,C or G
ccgcagaatggccttgctntcantacatacttactgtggctttcctgtggtcgtcagtaagaacaacgcacgggaagtccnttctctccttccatcncgngggaaggacgtgaaccaggttatcnagcttgggtggcaagcaaaacact

SEQ ID NO: 3248 - DNA, 148 bp, Homo sapiens
  misc_feature (1)...(148): n = A,T,C or G
agcgaacgcactggccggagcagggaaggtgcagagtggagatgaccgctgcagtccgccttttgtgctttggatgcatctctgaagatatnaacntnagccttcgngggcttaagactgattncaaggctgtgtggcctgtttacca

SEQ ID NO: 3249 - DNA, 148 bp, Homo sapiens
  misc_feature (1)...(148): n = A,T,C or G
ggcacatttgtacagntctgcctnncctttccagctgtctntnngtgactagcacttaggcatcgcgtgctatttgtggcctgaaacaagaaacnctnntgattacacncctggncgtagggaccaaggcttagaaaagtgatgaagc

SEQ ID NO: 3250 - DNA, 148 bp, Homo sapiens
  misc_feature (1)...(148): n = A,T,C or G
ggttacaggcaaccctggngtgacgaaaantatttctgtggtggaacattgcataggaagtgcccccagtagcaagcctgatcatgagtcacaacagcaatagcaggcattgtgctaagggnacaataaatagttcttagctcatgaa

SEQ ID NO: 3251 - DNA, 148 bp, Homo sapiens
ccgttgctgttgaacagtggaggaagtgttaaggtactgtagtggttgagatcgtctctggtcaacttacagggaatcttcgcttttaatttttgaaaattgaatattttatattaaataaaagatgtttggtgtgtaaaaaaaaaaa

SEQ ID NO: 3252 - DNA, 147 bp, Homo sapiens
  misc_feature (1)...(147): n = A,T,C or G
agggctcctggagacangcntgttgacctgagtgtccagcctcaaggccagcatggacggactggacagnanncncttcancttgtcctttggcctacacanncacncacangataacatgtacattccacacacatacctacgcac

SEQ ID NO: 3253 - DNA, 147 bp, Homo sapiens
  misc_feature (1)...(147): n = A,T,C or G
gcaataaggtagtcaacgcanaaggaatntggactgtgctnagccagtggatctaccaccttgctaaggctncnacccttgaatacagannntcttgtnntggngaccccctcccccaaccataaaatnattctcatggctacttca

SEQ ID NO: 3254 - DNA, 147 bp, Homo sapiens
  misc_feature (1)...(147): n = A,T,C or G
cagtggctggattgggaaaagcactgctnactgccntnagtgtggaaataatgntcctcttgagaaaggacngcanaggaactanaacaggtnganncctnttagtcacaatggnaaggaagctactcactcaaagaggccaacgaa

SEQ ID NO: 3255 - DNA, 146 bp, Homo sapiens
  misc_feature (1)...(146): n = A,T,C or G
aggtggagcttgtgggtgacntgcntgatcatagtctacnntanggnccacctnccagaggtctntgtgcccacggngttngaaaactatgtngccggatactnaggnggatgggaaccaggtagagtggacttttatgggcacag

SEQ ID NO: 3256 - DNA, 144 bp, Homo sapiens
  misc_feature (1)...(144): n = A,T,C or G
actcctccgaggggggggaaaaagntggccacaatcccacaggcanggggtngcataacaggantcngtcacngnancctctcttgacagctatggnanggatggagccangtccttaaaagnagacacacctcccttggtagg

SEQ ID NO: 3257 - DNA, 144 bp, Homo sapiens
  misc_feature (1)...(144): n = A,T,C or G
gcgtgattctttaaaaccgcttcgaantcattggaanaacctacagctggnctctgnttgctgacatggggaggccacgtggctctacgggnaagcactggtaantacctgacagcatcgacaccatccgcatcccacgtatac

SEQ ID NO: 3258 - DNA, 143 bp, Homo sapiens
  misc_feature (1)...(143): n = A,T,C or G
cgccgcccccagggacagtcacccncggcgcgcgagaagnaggacagcacgtgggcnagatgngtctgccatgccnacgnaacgcacggacgctcggacggactncacaagcatccaccggncactgccgccgcccagagtga

SEQ ID NO: 3259 - DNA, 143 bp, Homo sapiens
  misc_feature (1)...(143): n = A,T,C or G
aacagctgcgcggggngaancggggatcatgtaganggngtgcttccatnaannccattcgggggagaacaacaactttcagncaagaatggcgggagggaggaagctgcacccaccaaaatgggagggctaacaaaaaaaaa

SEQ ID NO: 3260 - DNA, 142 bp, Homo sapiens
  misc_feature (1)...(142): n = A,T,C or G
caggaattacagactgctgttacctgtcacttgggtccagggaactgnttccaaancatctngnagatcctttgtaagagtngccagcactaaantgctgaggcanctttctagtcctgcaacccatttctaaaaaaaaaaa

SEQ ID NO: 3261 - DNA, 142 bp, Homo sapiens
  misc_feature (1)...(142): n = A,T,C or G
ggctcaagacaagcctttcctggtgaccatgtgagctnnggnttatacagtgccataaattaacattgccttgacgacgtcgtggacaccngagacctggcctcagaagtagtaggccttttttttttttttttttaaaagg

SEQ ID NO: 3262 - DNA, 142 bp, Homo sapiens
  misc_feature (1)...(142): n = A,T,C or G
attagctttgagattcttgaagngagaaggttttacctctgtttccatctttgtatttatctatacaccatgctccttgcntccctttctctgactgttggcaggtntgtgatccnatcctgtgtttaaagtctgaatatac

SEQ ID NO: 3263 - DNA, 142 bp, Homo sapiens
  misc_feature (1)...(142): n = A,T,C or G
gacgcccttcccgaaatncctcaggctccggtcaggnggccacgataatgaggctctcattntcgnaaaagctggtgcanctgccagggntccgggctgncagccaggnctgctgtataggcggntccacctggatgcaaaa

SEQ ID NO: 3264 - DNA, 142 bp, Homo sapiens
  misc_feature (1)...(142): n = A,T,C or G
accatgtctatatcaaaanaacntctacagcatcnnacnncntttaaagaacacccgcccattaaaatctacaaacagagctgcacccctcacaatagtatatgaactctgtcacaatataaaatgggttcctccgacacca

SEQ ID NO: 3265 - DNA, 142 bp, Homo sapiens
  misc_feature (1)...(142): n = A,T,C or G
ccttggcagggcttgcactgagttngaggtgttgngtaaatgggctccntncacacgtgctgngctgangcctaaccnccttcttctacaancatgatgcaaattgctctctgngggcatcgttntaccacgctaagcaccg

SEQ ID NO: 3266 - DNA, 142 bp, Homo sapiens
  misc_feature (1)...(142): n = A,T,C or G
caactaggacccagttcttggttctaattctcaaatgggatttggatgaattagactggaaaattactgagatttttaaaaaatggatttgggctcnagagagagctcancgggtgaaagnactgactgctcttttcagagg

SEQ ID NO: 3267 - DNA, 142 bp, Homo sapiens
  misc_feature (1)...(142): n = A,T,C or G
ctgccggggccgtaccccccantgaacgctantcccctggnncctgccttctccgcttcaaggacaaaaccaggncaggtggcgggngncttttnactaggaatgnctgcanaactgtggaagtaaaacttttctcctgagt

SEQ ID NO: 3268 - DNA, 141 bp, Homo sapiens
  misc_feature (1)...(141): n = A,T,C or G
gcagctttccgttccagaagagacagtacattcctgaaancacagacaccttgnatttgcctggcttgtnctatctgntcnccgaaanacctaaggactgcntatggnanttcagaatctncacatacatacagaaggcag

SEQ ID NO: 3269 - DNA, 141 bp, Homo sapiens
  misc_feature (1)...(141): n = A,T,C or G
catccccacggcgacgnatggacggacgnactccacnctggtgcgcgtgtcacctnaggccggccaggatggagccactctcacnattntnatcaggncctgnccncgtacagaattgtccccctcaataaaattgctgtt

SEQ ID NO: 3270 - DNA, 141 bp, Homo sapiens
  misc_feature (1)...(141): n = A,T,C or G
gctagagcttgttctcntccttgaactgttgttatgagacnnatgcaggacctnatagaggatanctatccctatgtcactccaggaaccttaggaccaactttaaatgaanngggaagtctccacatccagatccagctg

SEQ ID NO: 3271 - DNA, 141 bp, Homo sapiens
  misc_feature (1)...(141): n = A,T,C or G
gggttacttcgcattgaacatttgtngtaactgngaccaacggcgtaacgggtacaccgtgcncagnctttgnaccntgtgngtgctgaggccnnnnctaaaaaaggtactacncgtggaanggngatccactctgacgcg

SEQ ID NO: 3272 - DNA, 140 bp, Homo sapiens
  misc_feature (1)...(140): n = A,T,C or G
tcctgcctgtcccgttnccttgtctcccggnggtgcttnntnncgctgctgtcccncctgctgctgcctgttgcccgcctggcccggcagnacctnctgcccttgctgcgccggctggnccaccaactgagctcccaaaa

SEQ ID NO: 3273 - DNA, 140 bp, Homo sapiens
  misc_feature (1)...(140): n = A,T,C or G
gggctcccgggccgttacctcnttntctcttggcccttgctcctacgcntctnacttnaaanaacaaaccaggacngtcggcgggggcttatacagcantgcttcannactggcnaaggaaaacttttcttcttagtact

SEQ ID NO: 3274 - DNA, 139 bp, Homo sapiens
tgggcttcagaactgtccctgacatcgttaccccagaagctggctgtgcgatttcacagtttgaaaggctagctctcatttagtcagtaagtcctattttggggatttcttctggaataaaagtttaaaatgaaaaaaa

SEQ ID NO: 3275 - DNA, 139 bp, Homo sapiens
  misc_feature (1)...(139): n = A,T,C or G
atacgaccatggaacattangtgggaactcagaaagcacagcgtgcaggcaatgntgacttctccttngaccatgatggatcctaagggaccaaactntcnnatntatgcttggcagctagtgtacctttacgcactgg

SEQ ID NO: 3276 - DNA, 138 bp, Homo sapiens
gaggcctgttcgagggttccagacatgccctcaactgtcatctatgtggagctggtgatccgaaccccagtattcatgcctacacagcaagtgctttaccaggtagccaatgaatacattttttgaagcaaaaaaaaa

SEQ ID NO: 3277 - DNA, 138 bp, Homo sapiens
  misc_feature (1)...(138): n = A,T,C or G
ggtttcgtgtcacggggttctttttcgtgtanggtgggggcgttnantagaatggcgggtatggntggggggngaggacggcattaagnangnaaaaggaagggtngtnctgtgtancagggtaaaatatggtggggg

SEQ ID NO: 3278 - DNA, 138 bp, Homo sapiens
  misc_feature (1)...(138): n = A,T,C or G
acaagtctatgacaggacggtctantgctgcnactncatncgcacngcacnttaggtgaattacacgggantaangtaagntagggcggacncacatctttcatggaaattgagtanagaanttaccaggaactactt

SEQ ID NO: 3279 - DNA, 137 bp, Homo sapiens
  misc_feature (1)...(137): n = A,T,C or G
ccaagttgatctaggggggnatgggcttatacactgacacattttatanaggcattggntggcccaagttgactgataggntcccctnaagttnantggggcctgtgaaaggtnnaaacttaaccatgattttcttt

SEQ ID NO: 3280 - DNA, 137 bp, Homo sapiens
  misc_feature (1)...(137): n = A,T,C or G
catcccacattggttagagtctccacagcncattcttgntaatggagtatatggcaagtcgccttctncgtaggcagncgncntcganagcacagagtaccacgctngtcacngtcncatcatcacataacaccaac

SEQ ID NO: 3281 - DNA, 137 bp, Homo sapiens
  misc_feature (1)...(137): n = A,T,C or G
actgaggttcggagctcacanncgatctnccacggggagggtcacaaccatccgtnncaancacctcgactccctcttcnggngtgtgtgaagacngctacnttgtacttacgtatnatactaaatacatctttaaa

SEQ ID NO: 3282 - DNA, 137 bp, Homo sapiens
  misc_feature (1)...(137): n = A,T,C or G
ctgtaaactgtttcctgctgaccganggagtgctggaatgcctgcccagtangtgccagcgctgtaaatgctcagtgtaaaatgagcccatgtaaagggctcaactcagcacaaataaaagttcaagctggaactta

SEQ ID NO: 3283 - DNA, 136 bp, Homo sapiens
  misc_feature (1)...(136): n = A,T,C or G
ttggtagactgaggtttntaatgcctatgtgtatgcgcanatngtttgtaagggcaaattatgcaacctaaagaaaatttaagcttggatgcctaaatatgaagttgtacttaataaaattttatacccacatgag

SEQ ID NO: 3284 - DNA, 136 bp, Homo sapiens
  misc_feature (1)...(136): n = A,T,C or G
aggtagtttgtgagcgcantnttatactttgctgaatnagagctcccgagncttgtgcncaggtttctatggcnagganttgctcctatgtctcatgggaggnncggatgccancggaangccccaggaagcatga

SEQ ID NO: 3285 - DNA, 136 bp, Homo sapiens
  misc_feature (1)...(136): n = A,T,C or G
tgcttctgacctctcnaaccngctgactatgcacacctgaggcactcacacatacctgactggcctggcactcantgcatanaacgagcnggaccttagctcactgacattgngactttntactgcctgctgaaaa

SEQ ID NO: 3286 - DNA, 136 bp, Homo sapiens
  misc_feature (1)...(136): n = A,T,C or G
ccactggtctgagttgctggcacaatcgcaaggntnagtatgtnatnctgtgnaacaaaggtcactggnggaaattncaagtacacnactntngtctatttatattngaaatanaactatactgctattgactaac

SEQ ID NO: 3287 - DNA, 135 bp, Homo sapiens
  misc_feature (1)...(135): n = A,T,C or G
aacttgttagagggacaagtggcgntnacccacccgagattgagcantaacagnatctgngatgcccttagatntatggggctgaacgcgcgctacactgactgnctnagagtgggcctaccctacgccgggagg

SEQ ID NO: 3288 - DNA, 135 bp, Homo sapiens
actgaggcaggtccctgctccagctccagtagaatctgaagctgaccctggtacctcaagactcatacccaaggaccggtaaaggagtcacagaaaaggaaatattatctcattaaaaccgaggaacaaaggacc

SEQ ID NO: 3289 - DNA, 135 bp, Homo sapiens
  misc_feature (1)...(135): n = A,T,C or G
attctgcctcatgattcctggnccctcgtcccaaataaaaggctgccacctgtcncacctggcttctgagaacactgnnagnctcaagtggagagatcgatgaaatacaccgcagnnngctttagtcctactatt

SEQ ID NO: 3290 - DNA, 135 bp, Homo sapiens
  misc_feature (1)...(135): n = A,T,C or G
catgacgctcagaccctctacctatcgagtnacatcgcggccctgtgaatgcttattctcaccgagtgnacgcgaagcctcctggcaganannnctgngctcattaaacagtaccagtgccttggcccaccaaga

SEQ ID NO: 3291 - DNA, 135 bp, Homo sapiens
  misc_feature (1)...(135): n = A,T,C or G
cctctcacgtaattcggtagcctactgcaaggctcttaccangcccgcacgggaagccccgccccgggnaggttgctaggctncggnagccgnaagtnccgnctgnggagtagtcgnngctgccgccgccgcctg

SEQ ID NO: 3292 - DNA, 135 bp, Homo sapiens
  misc_feature (1)...(135): n = A,T,C or G
gggggggggtggggggggggggnccgncgngcgggggcccgccnanccggccggtgcgatngagggagggagaaaaacanggaaagggcngnanggaaaacggcggggaaaaggnngagacgacgcgacagaaaa

SEQ ID NO: 3293 - DNA, 135 bp, Homo sapiens
  misc_feature (1)...(135): n = A,T,C or G
ggaaggccaagtcccgccaagtagggaaagggagnaagggcaaatacaaggnaaggaaacgatcgagtaagnatgcagggagtagnagacatctcgtgcacggctttcattaaagactgcttaagtaaaaaaaaa

SEQ ID NO: 3294 - DNA, 135 bp, Homo sapiens
  misc_feature (1)...(135): n = A,T,C or G
tgggtaagaacctctnngaanaattcttaaacgcctagggccanaccacttnaaggnggtgnggttgcanttncgtagtggttaagggactatggcananaatctcaagccacgggnggggggggaggaatactt

SEQ ID NO: 3295 - DNA, 135 bp, Homo sapiens
  misc_feature (1)...(135): n = A,T,C or G
ggtatatgtgagggtgtctntgngaccctgactcntcacatctgctgcatggaaatccnnngacttgtgcctctggcacctgaacaagncagagtctgtgtccagntnaagaatattcaccccagctgtgacgga

SEQ ID NO: 3296 - DNA, 134 bp, Homo sapiens
  misc_feature (1)...(134): n = A,T,C or G
ttacaatacagacgacctatnttttancagagacgtgtgcccatgggtanantctgtncacntntactaaggntattngaggctttaccacaancactggggcttttcccaaccctttaacacaaggggtacac

SEQ ID NO: 3297 - DNA, 134 bp, Homo sapiens
  misc_feature (1)...(134): n = A,T,C or G
gctacggcctggatcttngtggtaacncaggaacaagcgtgcagganctgannnctnctttgtnctgtggatcctaaggaccnaactaaggnattaangcttggnagcagggtaccnttacgcactgaaccatt

SEQ ID NO: 3298 - DNA, 133 bp, Homo sapiens
  misc_feature (1)...(133): n = A,T,C or G
tgagatggattgtacnccggctncnaggaccaggccctggggtncccccaaagcgnnctcgagggcacctatggtgatgaggannagccttcgccgtcanacnctganggctaacctggacctgcatggattc

SEQ ID NO: 3299 - DNA, 133 bp, Homo sapiens
  misc_feature (1)...(133): n = A,T,C or G
gggctgaggttttagccggggcaacggccagaattacttctngnggaactctcaaaggtcttttcaggaagcatggaaagcccnccanatatctacngcctcgaatcgaggaatncgagctcaaaaaaaaaaa

SEQ ID NO: 3300 - DNA, 133 bp, Homo sapiens
  misc_feature (1)...(133): n = A,T,C or G
ctctaatcatctcatattttagtgctttaggttttttacatgacacatcgattcncctggtgccatgccnatgggangcacttnnnattngcttctttccacccagctangtcttcngcttaataaatctgcc

SEQ ID NO: 3301 - DNA, 132 bp, Homo sapiens
  misc_feature (1)...(132): n = A,T,C or G
gtatctggagcacacattgagctcagtngattattttaaaagagagaaactagaagttagggcaggggatgagagtggatcagtatacactgtatataattctcaaaagaactnatgaaagtacaagcaaag

SEQ ID NO: 3302 - DNA, 132 bp, Homo sapiens
  misc_feature (1)...(132): n = A,T,C or G
tcgtgtgggcacatcccccaaangctttgcattgtgtgattctgagccctcctctgtctgtcagttaattgataaatctaattgattaactactatactacaatgaagacaattgtccccacaaaaaaaaaa

SEQ ID NO: 3303 - DNA, 132 bp, Homo sapiens
  misc_feature (1)...(132): n = A,T,C or G
ctctggaaaatctgctttgtctcggggntgggangcttngctgcnncantcgttgcttaacacgcccantggtggtaaactgnagaagccanacacgtnacacctttcctaatggaaccaggaggaatattt

SEQ ID NO: 3304 - DNA, 132 bp, Homo sapiens
  misc_feature (1)...(132): n = A,T,C or G
tactgagcaggtagagagaggcgggacttctgggcagagatggactctgttggaagaatcaagtngacacggagncgctcggacttanggagtganaaaaaggtaanaggccacgngccagacatggatcca

SEQ ID NO: 3305 - DNA, 131 bp, Homo sapiens
  misc_feature (1)...(131): n = A,T,C or G
cctcatgctgctatccgagnganccagtctctgagcangaagcccaagcanagaagngaaggaanaaggaggcggaatcgtcccaaaatgtctctngcccagagnaaagntcgggttgctcaaaacaaggc

SEQ ID NO: 3306 - DNA, 131 bp, Homo sapiens
  misc_feature (1)...(131): n = A,T,C or G
tgaacttgctatggcattgttacaagtacctactggcaccgtggttttgtaggaaatgtgaatctcaggaggagagcagccagngtgagtatgtnagctgtgtccccatgcanntatggtagctttaaaaa

SEQ ID NO: 3307 - DNA, 131 bp, Homo sapiens
  misc_feature (1)...(131): n = A,T,C or G
aactgatcacttttcccatgtataagcgcanggggggtcntngncatgganngtnntttgaaacctttgtnacttgaagcgccctttantcctgcagtaattnttgtgcgtgncctggttatgcaagcata

SEQ ID NO: 3308 - DNA, 131 bp, Homo sapiens
  misc_feature (1)...(131): n = A,T,C or G
tcagaggataactgtatttattttgtattccatgtgtaaatacttttagtatacagaacgagctatgcctaattagggcaccattttaaaaaactgaaatctttangggnggngttggtctttttctaata

SEQ ID NO: 3309 - DNA, 131 bp, Homo sapiens
  misc_feature (1)...(131): n = A,T,C or G
cagtaccagtgccctgggtccagcaatctggttggcttgntgggtaanggtgcctgctacagagcctgngggatgccagcccaacccctggaacccnccacggcgggaagaaaactaactttaccaagcgg

SEQ ID NO: 3310 - DNA, 131 bp, Homo sapiens
  misc_feature (1)...(131): n = A,T,C or G
gggggggggggggggggggggnangnctgggagtggnccttgggcctgcggtaggacctgggncagangccttattacttnttgtggnaactctcaaggtcggacaggcaagcatggctggttccatttat

SEQ ID NO: 3311 - DNA, 130 bp, Homo sapiens
  misc_feature (1)...(130): n = A,T,C or G
tgaacattgaccttcctgactgnagatntcantacgntagctgtctcctgnttgnnntactatgcctcccccttccatcatggactgtactctggaactgngngcccaaanatacactttttttctgttt

SEQ ID NO: 3312 - DNA, 130 bp, Homo sapiens
  misc_feature (1)...(130): n = A,T,C or G
ctgactggacgaagccttgcgtgtaccacaggctgaaggaggaggaggaggaaggccaggaatgctggngtgaatcttnaagggccggccaactgaaatcatggganaaatgccagctaccacctaatat

SEQ ID NO: 3313 - DNA, 130 bp, Homo sapiens
  misc_feature (1)...(130): n = A,T,C or G
acaacaccatcagccttgcnctcaaagtactgaagctgcgatgacaagcacaggcnccagatactagagggncngatttaagangcgganatactagtgaanttcntcctgcgcatgcatgtgggccgcc

SEQ ID NO: 3314 - DNA, 129 bp, Homo sapiens
  misc_feature (1)...(129): n = A,T,C or G
agaagggcttgagaancccctggnttacaagaggatnagtctgcccatcntgggtgcttgnacntcagatncngtgnaagagcagnatatgntnttaaccgcctgagcaacaaaacaaaacgaaaaaaa

SEQ ID NO: 3315 - DNA, 129 bp, Homo sapiens
  misc_feature (1)...(129): n = A,T,C or G
ttcgtcattccattccctgcctcagaaaggatggcagctccatcgtccagggtgctggggctgaaataaaactccatcatccctcattcttttaactaaactggnagnggggaccaaagcattcattca

SEQ ID NO: 3316 - DNA, 129 bp, Homo sapiens
  misc_feature (1)...(129): n = A,T,C or G
tagaagtagcgaaaaaccaccgggcgtagcaggcacnctttggacgctngtggcttatnccagagccttnatcnctgctgcantgggngcttatcaatcctgnctgttggaaacctagcacacacataa

SEQ ID NO: 3317 - DNA, 129 bp, Homo sapiens
  misc_feature (1)...(129): n = A,T,C or G
gtgcccttttccaaacaccacgtggnacagctactggagctcaaacaacacacaaggaaatcctcctttccggcttttcttcagtcctcttgggncctgagtcttaccaccatctgctcccaagtatga

SEQ ID NO: 3318 - DNA, 129 bp, Homo sapiens
  misc_feature (1)...(129): n = A,T,C or G
ttctgagaaccaagcacacgtagtcactagcagaacagccttcgtagtctaggatactggcagcanctgggttcttttgtccttcctcaaactgattttgcagccacggcagcaggtaaggggagatgg

SEQ ID NO: 3319 - DNA, 129 bp, Homo sapiens
  misc_feature (1)...(129): n = A,T,C or G
ccccagcaacgcacgtggttggcctncaccaaccattccgtnaacaagaacctggactaccctcttcctggaagtgtctgaggcacagctacattgtacttacatataataataaataaatctttaaaa

SEQ ID NO: 3320 - DNA, 127 bp, Homo sapiens
  misc_feature (1)...(127): n = A,T,C or G
tcccggagcccgtacccnaccgtaaactcttgccccttgtgcctnccttctgcgctctnangnagnaaaccancgggantgacgtnatgncttttaacnagnaatggctcgaggactggcgaaggaa

SEQ ID NO: 3321 - DNA, 127 bp, Homo sapiens
  misc_feature (1)...(127): n = A,T,C or G
tatgggtacctgcgatacatacagtgtaggngggaagcntcngggangctantgntgctattgacatgctttcacaccgnacctaggctnangnaagactgtataanaggggtcagaatacttgcaa

SEQ ID NO: 3322 - DNA, 126 bp, Homo sapiens
  misc_feature (1)...(126): n = A,T,C or G
gcactactcacaacaaggntncgcccaccanggcactttcatactcactttctnnttgntaggnaacaagnaacgagaaacatggtctccantgttcctgccntnatgggtggcaacctaacctta

SEQ ID NO: 3323 - DNA, 126 bp, Homo sapiens
  misc_feature (1)...(126): n = A,T,C or G
cccgtcgtgaacatatcacaangcgagaatattcattgcctgtgtngtcnnngcggccattgatngtanatgtgnancagagctccantgctgnggacttggggaagcacacgactacaggtgggc

SEQ ID NO: 3324 - DNA, 125 bp, Homo sapiens
  misc_feature (1)...(125): n = A,T,C or G
cctcggtgtcaaagctcccctntctnntagganccaggctgcgcactgttgngtgctatnttactctgacccantgggctggcatgcaaccccnggaacccgaanaccacattacctaaaaagct

SEQ ID NO: 3325 - DNA, 125 bp, Homo sapiens
  misc_feature (1)...(125): n = A,T,C or G
actgagttctagtacgtgnaatgtgtngtgagagaagcatncnangntgtaagctgagcanggcggcaaactcctgcaatcccaagaggacactcanaagcgtgaggcncagcaaactgaagatt

SEQ ID NO: 3326 - DNA, 125 bp, Homo sapiens
  misc_feature (1)...(125): n = A,T,C or G
ttcataccaatcgaccgccaanctaagcattaagtnctctgggaggacacagaaggcctaaaaaccggaagagtctgtttgttgaagggaacactgaatcaacagcagttccaacataaaaaaaa

SEQ ID NO: 3327 - DNA, 125 bp, Homo sapiens
  misc_feature (1)...(125): n = A,T,C or G
aacatccctgctagccagccagtactagcccgtccagctccaggactgagtaantggctntgnctcaaaatgatgatgatnatgaccacaatgtananattgtttgnggaagacacctcgatgtc

SEQ ID NO: 3328 - DNA, 124 bp, Homo sapiens
  misc_feature (1)...(124): n = A,T,C or G
ggctgcagttaagttatgtgacattcctcatattgagcatagtatgggggggtctgtgttcctgtgaaccggcccggccaagaaaaatataaaaggtantgtttgctttgtttaaaaaaaaaaa

SEQ ID NO: 3329 - DNA, 124 bp, Homo sapiens
  misc_feature (1)...(124): n = A,T,C or G
gaccgctgagagtcctcanatgaggttgtatttggttagggcngngccacngggatcaaactactgtctctntttgnattttantaaagcacacataacaggaantantactgtccgtatcatc

SEQ ID NO: 3330 - DNA, 124 bp, Homo sapiens
  misc_feature (1)...(124): n = A,T,C or G
gcgtttgtattagtagttgtanggcgatagnaatnntgttgnctgatagtcncattgtgtggggtgacgataggggnacagtaaagcccactttagttttncnttntgactttctgaaccagat

SEQ ID NO: 3331 - DNA, 124 bp, Homo sapiens
  misc_feature (1)...(124): n = A,T,C or G
aacactgctcacggacaantgcancctgaatgctcctgaagagggggcntcctcncaactgtgtanatanaatatgnacaaaccnannctttnngtacaaacctgaccttttgtacaacacctt

SEQ ID NO: 3332 - DNA, 124 bp, Homo sapiens
  misc_feature (1)...(124): n = A,T,C or G
ctgtgtctccctgaaacnttgaacaagtgctaattgcgcctgctaaccctgtggccntgtaactgntagctttgctcatgacanccncaggacagggagttgcttccncctgaacctttttgca

SEQ ID NO: 3333 - DNA, 123 bp, Homo sapiens
  misc_feature (1)...(123): n = A,T,C or G
cctaaaaatattatgtccaccaantgctgaggcttccaggnntnagaggcannaanaacctgtgcctggctggaggagaaagagaaggaggttgncagngccntgcgcctactttaagaccat

SEQ ID NO: 3334 - DNA, 123 bp, Homo sapiens
  misc_feature (1)...(123): n = A,T,C or G
acccaggcgccactggtatgccgcgaanntatccaancaacagaatcgaagtccctccggttggatctagcccgtgctgagggggaaangaagggagctctggctgggtcctgagggaataaa

SEQ ID NO: 3335 - DNA, 122 bp, Homo sapiens
  misc_feature (1)...(122): n = A,T,C or G
caggatacattgctgctatgtntgntagtaaataactgtgtacaccnggacnntggtggcgcacgcctttgatnccatnacttgggnaggcagcagtgaggcggcatttatgaatggcgagg

SEQ ID NO: 3336 - DNA, 120 bp, Homo sapiens
  misc_feature (1)...(120): n = A,T,C or G
cttgcatgctgctcacgtgcangcagcacagcngtcccancttggatgaacngatgtntgnnttnggcaagccgaacnttccgctcaagataaagttttcgagtagaagcagcacgatga

SEQ ID NO: 3337 - DNA, 120 bp, Homo sapiens
  misc_feature (1)...(120): n = A,T,C or G
ccctgcatatgtggcacaatactttccccaggttacccctangcagctcttgccctgnaactcaccaacagtattgatctgcaaactaatgaggatccnctgattccactagtgctagga

SEQ ID NO: 3338 - DNA, 120 bp, Homo sapiens
  misc_feature (1)...(120): n = A,T,C or G
gagcaaccacacactttctgattggangctaacnancatactactggganngancccatatancccactttaagcgtaaggcaanaactctgnggntaggaaaagacatagacctggtgg

SEQ ID NO: 3339 - DNA, 119 bp, Homo sapiens
  misc_feature (1)...(119): n = A,T,C or G
gagtgggtttagggctggngcatagcctggnacagangaccataaatctacttgcttgtgggaacttcttcaangtccggcacagggaagcatggantggntccattataaaaaaaaaa

SEQ ID NO: 3340 - DNA, 118 bp, Homo sapiens
  misc_feature (1)...(118): n = A,T,C or G
tattgatgcccactcttgtaattctttaacatcctcacagttggngatggnatntggaacngccgngantatgantttgcccantctgngcatggaatattnaatgctggtggtcttt

SEQ ID NO: 3341 - DNA, 118 bp, Homo sapiens
  misc_feature (1)...(118): n = A,T,C or G
actgaggcatggcccgaggtgtgtctgcncnngggctctanctctgcacgttcgatgggtcaagattagccatcacgggtagccctggagtggantaccancatgcaaaaagaaaaaa

SEQ ID NO: 3342 - DNA, 118 bp, Homo sapiens
  misc_feature (1)...(118): n = A,T,C or G
acatgagacattccttctgctgtgagagcgtgccanccataatagggnagggctttggngatgcagntgtcttcgagtcacttctgttcctgtaantaaccatcacccatattcctgt

SEQ ID NO: 3343 - DNA, 118 bp, Homo sapiens
  misc_feature (1)...(118): n = A,T,C or G
ggactccggggccgtcccacagtnacgcttgnccctgttcctancttctgcgcttaaganaaaccaggcagtgcggngctttacagnaatgctcagactgcaagaaaactttctctag

SEQ ID NO: 3344 - DNA, 118 bp, Homo sapiens
  misc_feature (1)...(118): n = A,T,C or G
tggattgtggaaatgtgcccagaagcaggtttggcggtccagcagcntgntgcccancanancctncagtccttctggcccagagtcatggaataaatccgaaacttaacagggaaag

SEQ ID NO: 3345 - DNA, 117 bp, Homo sapiens
  misc_feature (1)...(117): n = A,T,C or G
gagaaaaggaagaggaagcncagcccccaccccccccagaagtttaggggcctggagacaattggactactgtggagtttaaaagctataaattactatgttcctcaaaaaaaaaaa

SEQ ID NO: 3346 - DNA, 117 bp, Homo sapiens
  misc_feature (1)...(117): n = A,T,C or G
tatgagagaatgcaagcgctgtacctaggctgntgacaagctagcanggatttaatgtaacaacagaatggattcataaataaactgcgagcacgtggtgggatttaaaaaaaaaaa

SEQ ID NO: 3347 - DNA, 116 bp, Homo sapiens
  misc_feature (1)...(116): n = A,T,C or G
gactgaggtggggtctttnatatgagtncatgaagcctggcaaggactcgaaccagcgaatccagcctctgaggactgttttttccgctttaagaacctacctcgaaaaaaaaaaa

SEQ ID NO: 3348 - DNA, 116 bp, Homo sapiens
  misc_feature (1)...(116): n = A,T,C or G
ggccttcagcaacccctggnattacaaggagggatgaattgcccaacatgggtgctcggnacctcagtatcctctgcaagtagcagtaaatgtttttaaacgctgaaaaaaaaaaa

SEQ ID NO: 3349 - DNA, 116 bp, Homo sapiens
  misc_feature (1)...(116): n = A,T,C or G
tgcggatgctttacaggaatgctcanactgcaangaaaactttcttctantctatgttgggggaantttaaanactgntttaagagntaaanaataatgaaaaaaaccctttaaac

SEQ ID NO: 3350 - DNA, 116 bp, Homo sapiens
  misc_feature (1)...(116): n = A,T,C or G
acacccttatgtacagctactgnaacaaggtaatgnggtanaactcactgccacccgtnagaatgccagctacagtgtacttaatataataataaatnaatctttaaaaaaaaaaa

SEQ ID NO: 3351 - DNA, 115 bp, Homo sapiens
  misc_feature (1)...(115): n = A,T,C or G
ctaggctacttacttgctacccgtnnanttattacggncntatggcataagcngncaaanccnggaccttgaacagggntgccactgagtctcacctatagctccaccttctttg

SEQ ID NO: 3352 - DNA, 115 bp, Homo sapiens
  misc_feature (1)...(115): n = A,T,C or G
ccaaacgatccagattncccagcaactgcaggtacaggtgcctggagnacccccggggggctattatcctagncctccccatggggggggccagtntggcagaggactgccccca

SEQ ID NO: 3353 - DNA, 115 bp, Homo sapiens
catcgatttatttattactcaccctgtcctacggattaagtttctcttaaacctgttcctcccctgaaccctggcagccgcctaagtaaaatgcataagatctgaaaaaaaaaaa

SEQ ID NO: 3354 - DNA, 115 bp, Homo sapiens
  misc_feature (1)...(115): n = A,T,C or G
gatagagacaggatacccacntnctatgaantagtatagatgactntttgttcttagtaatnacaataaacaacatcagnagataataaaantaactatcaggtaaaaaaaaaaa

SEQ ID NO: 3355 - DNA, 114 bp, Homo sapiens
  misc_feature (1)...(114): n = A,T,C or G
ccaggacaatagcagggggagatgacccgtgtacgtgcgacatggattgtagatgtnanggtangccaccacanangaagcttcgtgatgaccgngaataagagggctcccacc

SEQ ID NO: 3356 - DNA, 114 bp, Homo sapiens
  misc_feature (1)...(114): n = A,T,C or G
taacagtgcgcgaacctttctttnttataacaacattctttncggntcacttgagtntaattcccaggncactagcnncagactatttaccactgnccctacttggctgagatc

SEQ ID NO: 3357 - DNA, 113 bp, Homo sapiens
  misc_feature (1)...(113): n = A,T,C or G
catcagtgaacaacagncagttcagcagatgtatgactgatcaatatgctgaataagatgntataaaagctcattcctaaaagggacgtcttcctccaaggttccaaaaacat

SEQ ID NO: 3358 - DNA, 112 bp, Homo sapiens
tggacctggagttagcaattggccaaactggcgtgacaagcaaggcccggaatcctcctgtatccacctcccccagcctctgggattacagtcacaagctataaaaaaaaaa

SEQ ID NO: 3359 - DNA, 112 bp, Homo sapiens
  misc_feature (1)...(112): n = A,T,C or G
gtatatcagcaaggtgaaaggagaggccaggtcanccntgaccaagccgnagaatanccncaataactgttanaaanctttcnaatgatnataagccaaagctgactattgg

SEQ ID NO: 3360 - DNA, 112 bp, Homo sapiens
  misc_feature (1)...(112): n = A,T,C or G
cagaatctcgagcactagtacgggaacacgctgccaagtgccccaggacgggatcaaggactccaatgacnaccataagatnccctaatgctaagacactgcaaaaaaaaaa

SEQ ID NO: 3361 - DNA, 112 bp, Homo sapiens
  misc_feature (1)...(112): n = A,T,C or G
ggtgggtttgggtctgtggtcatatcctgggncgtngcctaantactttcttgtggtaactctgcacngtcggnacaggnaagcatggctggttccattattaaaaaaaaaa

SEQ ID NO: 3362 - DNA, 112 bp, Homo sapiens
  misc_feature (1)...(112): n = A,T,C or G
gttaactatttgctctggcggggcanctgcctggnncaaaggggaaggattccatcttccagggtgtctttnaggaaggtcttggntcatnaaagccatcccgaaaagccct

SEQ ID NO: 3363 - DNA, 111 bp, Homo sapiens
gaaatcgggaaagatggacggatcagccatttggatgacttatctgttccggtggacgaagaggaccctccagaagacgctctcactgtcttgacagctgaggacaggcag

SEQ ID NO: 3364 - DNA, 111 bp, Homo sapiens
  misc_feature (1)...(111): n = A,T,C or G
tgttccacacttctgcggtgcgcccacgtgtagcatatngcttgtggtatttncactctgnnacttttgatttattttttcattaaatgcttgcataggtaaaaaaaaaaa

SEQ ID NO: 3365 - DNA, 111 bp, Homo sapiens
  misc_feature (1)...(111): n = A,T,C or G
atctgcgtcagactgcangannactttctctagcctatgtgngnggnattttaaatctgctttaagagttaaataatnatgaaaaaaaccctttaaacactaaaaaaaaaa

SEQ ID NO: 3366 - DNA, 111 bp, Homo sapiens
  misc_feature (1)...(111): n = A,T,C or G
actgagatatggtttctagttttagggtttctgagtgcataaaatgtnaaaatagtaaatgagaaaaattattatacaataaattcttatgttgaaagttaaaaaaaaaaa

SEQ ID NO: 3367 - DNA, 111 bp, Homo sapiens
  misc_feature (1)...(111): n = A,T,C or G
agagggcaagtcccccctgactatgggaggccaccatacccanggncngtggtccngnnttgaatcnaangnaggaagcacgctgagcatgancattgaccttgctgactg

SEQ ID NO: 3368 - DNA, 110 bp, Homo sapiens
  misc_feature (1)...(110): n = A,T,C or G
tctgtgcctgtccccaggctggggtcagagacatgccatgaaatatgtactggggacacgggtncaggtgtgccacgcaataaatatttgtcaaagtcaaaaaacaaaaa

SEQ ID NO: 3369 - DNA, 110 bp, Homo sapiens
  misc_feature (1)...(110): n = A,T,C or G
cttactgtatacaccatnttnacatgacccaggctgtgcaatggtcctctttattncaggntacagtcaacaacactattggnactntgcatgactccaactcttctgtt

SEQ ID NO: 3370 - DNA, 110 bp, Homo sapiens
  misc_feature (1)...(110): n = A,T,C or G
agtcagcaccactgcanctgcacgtgtgtcaactggtgangttcacagttcagtggnacagtgtantgccccggctatgngttaaaggngcactgtttctctctgagaaa

SEQ ID NO: 3371 - DNA, 110 bp, Homo sapiens
  misc_feature (1)...(110): n = A,T,C or G
tcattggacacgaaganccngngtctctactcttagttaanggtacactngtctactgnctctggccgtcgtgtggncattccctgangtactgtggacgcatgcactgt

SEQ ID NO: 3372 - DNA, 110 bp, Homo sapiens
  misc_feature (1)...(110): n = A,T,C or G
gccacaagtaattggtaatgnccgtnaatgcccttcgcaggcagcancncagtaggatgaantcaccttnctttntctngggcggagatcaaatcctggaaaaaattatt

SEQ ID NO: 3373 - DNA, 109 bp, Homo sapiens
  misc_feature (1)...(109): n = A,T,C or G
agctggatgaccgggcgtgacgccttgcaggtcaggagcatcacaattggngagcagngcgtgccaagcntaaaaaggaantactggtggaaaaactgaaaaaaaaaaa

SEQ ID NO: 3374 - DNA, 109 bp, Homo sapiens
  misc_feature (1)...(109): n = A,T,C or G
aacaacttcccaccattgcccaaatttcatncnccactgtaaaccatgtttctaccaagnacttcggggcagncatgcctcctcagcatctcagcttgaccaaacgcct

SEQ ID NO: 3375 - DNA, 109 bp, Homo sapiens
  misc_feature (1)...(109): n = A,T,C or G
atgagagtgggcttggttntggggtagnatccagggccnggngccataattacttcttgtttnangctcaaggtcggaacagnaaagcccggctggttccatataaaaa

SEQ ID NO: 3376 - DNA, 109 bp, Homo sapiens
  misc_feature (1)...(109): n = A,T,C or G
gagtgggtttggggctgtagtagtatcctgggncaggngccataattacttcttgtggaactctcaangtcngcacaggtaancatgnctggctccatataaaaaaaaa

SEQ ID NO: 3377 - DNA, 109 bp, Homo sapiens
  misc_feature (1)...(109): n = A,T,C or G
tccccctgtcagctctcaaatntctgacctntctaaaaggaagantccgaggagtcatgangatgacatgggcttgggtnttttgagactaanctgctttccgttagtt

SEQ ID NO: 3378 - DNA, 108 bp, Homo sapiens
  misc_feature (1)...(108): n = A,T,C or G
tactttgtttttggtgttaanttctatgctgannatccatgncacctcatngangaantaaccaggtctagtattgacttnatctttgaataatgcaccttattaaaa

SEQ ID NO: 3379 - DNA, 108 bp, Homo sapiens
  misc_feature (1)...(108): n = A,T,C or G
acatgcttgagctttgtgantgtaccacatgaaaannnnaggtgtcgagcccccctccttagctaaacagacctatgtaataaaaaagtaatttcaaaccaaaaaaaa

SEQ ID NO: 3380 - DNA, 108 bp, Homo sapiens
  misc_feature (1)...(108): n = A,T,C or G
tggggtatgcgaaaanatcagtgctggtttccctcnncactnccctgtttcaccttgtnaaaagcctcctggttccaggaaaactgagtcgccacgagccttcttcag

SEQ ID NO: 3381 - DNA, 108 bp, Homo sapiens
  misc_feature (1)...(108): n = A,T,C or G
cgtaatactacccctgganctctttcaggcanttggggtaactgngcggcaagtactctatgtctgtttncagcactgcactgcacatgtcgggtaacacagtaaatt

SEQ ID NO: 3382 - DNA, 108 bp, Homo sapiens
  misc_feature (1)...(108): n = A,T,C or G
tggagtcttagggactgaggtanttatcctggggcncggncctaaatacttgcttgtggaaactgtacaaggttcggnacaggaaagcatggctggtttccataatta

SEQ ID NO: 3383 - DNA, 107 bp, Homo sapiens
  misc_feature (1)...(107): n = A,T,C or G
gcggtgctttacagaatgctcagactgcnagaaaacatttctctagtctatgtnggggaattttaaatntgntntaagagntaaataataatgaaaaaaacccttta

SEQ ID NO: 3384 - DNA, 107 bp, Homo sapiens
  misc_feature (1)...(107): n = A,T,C or G
atatacgaccatgttcttcccctactggtgnngcggtcctagcttcaggtgaangccntcattgcgcaccttgactgcnnacnannacaggcaccatctaacgttac

SEQ ID NO: 3385 - DNA, 107 bp, Homo sapiens
  misc_feature (1)...(107): n = A,T,C or G
acacaatgcttttgtagtnnntgccntcctctataannaccgtcatnaggccanattcaaccaccggctaaactaccattcctttntgtntgtgtccatacacggaa

SEQ ID NO: 3386 - DNA, 106 bp, Homo sapiens
  misc_feature (1)...(106): n = A,T,C or G
gcaggtccaggacagncagagcgtatacngaaaaacagtgcctgcctttgagtcatntgctccagnaangaactgcgtgctacctgggcagtaaccccagaaacct

SEQ ID NO: 3387 - DNA, 106 bp, Homo sapiens
  misc_feature (1)...(106): n = A,T,C or G
aaattttccctgtgaangctcaaatctgcagtctctgagtcattnctacccacagntggnaagcancgctggcatattaaaggagctacctctggaaaaaaaaaaa

SEQ ID NO: 3388 - DNA, 106 bp, Homo sapiens
  misc_feature (1)...(106): n = A,T,C or G
tcgagctcacatgggccnacactcgacttnaggnnccccacagnngnctttcagtcaatcaaaagtgtcaactcgattaataaatctttgacccaaagaaaaaaaa

SEQ ID NO: 3389 - DNA, 106 bp, Homo sapiens
  misc_feature (1)...(106): n = A,T,C or G
caaggaaaactttacttcttagtncttatgtttgtcgggaattttaaatnctcgtntntcaagtagtttacacataattnatgagaaaaaacccttttaaacactg

SEQ ID NO: 3390 - DNA, 106 bp, Homo sapiens
  misc_feature (1)...(106): n = A,T,C or G
agaataggctcaccagttganaganctcattgttcttccacagggaccccaaccacctgtnaactgcngntccaggtactctnacgccctcttctggactctacag

SEQ ID NO: 3391 - DNA, 106 bp, Homo sapiens
  misc_feature (1)...(106): n = A,T,C or G
gtaactttaccctgtgangactcaaatctgattttgtgagcatttntacccacagctgggaagcagagctggttattaaaggagctacctctggtaaaaaaaacaa

SEQ ID NO: 3392 - DNA, 105 bp, Homo sapiens
aactgctatgtagaccaggctgacctcaaactcacagagatcgcctccctctgccttctgattgctggaattaaaagcatgtagcatggaccaccaaaaaaaaaa

SEQ ID NO: 3393 - DNA, 105 bp, Homo sapiens
  misc_feature (1)...(105): n = A,T,C or G
aactaaaaaacaaacatttgaaaaatcaggnagcaaccaatagcatctcttcaacatatctaaaacttaaataaatgttgaaaaagttttctaaaaaaatgcaag

SEQ ID NO: 3394 - DNA, 105 bp, Homo sapiens
  misc_feature (1)...(105): n = A,T,C or G
gcttccagggaacctttctncatacccattccacacattaccaagcatnntnnggatcgngccntgcactgcatgtgtctcctccaatgaagagctccaagagat

SEQ ID NO: 3395 - DNA, 105 bp, Homo sapiens
  misc_feature (1)...(105): n = A,T,C or G
ggccagcagcactgctgtacactgnggncccttgtacttctcaaagctcttctgactcattggttganacccaccttgatttgagttttgaactggggatacttg

SEQ ID NO: 3396 - DNA, 105 bp, Homo sapiens
ctgtatgtagaatgcagcttccctgtgcatcactagggccaccagggatatccacctgttcaccttcacttgggataaatgtttctgttttgggaaaaaaaaaaa

SEQ ID NO: 3397 - DNA, 105 bp, Homo sapiens
  misc_feature (1)...(105): n = A,T,C or G
tccaggctgcagcctgcctctcctgaacnacaaccaacccctgntatttgngtattanaaatgtcagagancagcgatcttcaggtntngagacacacatgtgac

SEQ ID NO: 3398 - DNA, 104 bp, Homo sapiens
  misc_feature (1)...(104): n = A,T,C or G
tcacctgcccaccatggctcctagccagtcactatgctggaacatggnctcacgtcannagnggacaacaggacaagaatnaatgatgtttttaaaaaaaaaaa

SEQ ID NO: 3399 - DNA, 104 bp, Homo sapiens
  misc_feature (1)...(104): n = A,T,C or G
gtttgctaaggatttagtattggaaagaggcgttcctgtgtngagngcttnctaccactgcttgtgnctaaattaatgctgtntattaaaatgtagacacctaa

SEQ ID NO: 3400 - DNA, 104 bp, Homo sapiens
  misc_feature (1)...(104): n = A,T,C or G
ggccagctactacgccagtgcatttaccacnacagangccgcactacactatcattcgnngtactctnggagnacccacatgaataaaaacttgagacatgtct

SEQ ID NO: 3401 - DNA, 104 bp, Homo sapiens
  misc_feature (1)...(104): n = A,T,C or G
actgagggatgcagctgtcttcttctgggctccagaggtncccagcacagcaaaaacatccaggcnaaatatccacacacattgnattttttgaaaaaaaataa

SEQ ID NO: 3402 - DNA, 104 bp, Homo sapiens
  misc_feature (1)...(104): n = A,T,C or G
cattagctaaagacggcgtantagnacctgcttanggatanacgggtgnacttngccttcctgacacaggnattctcttaccngaacctggcgcgtaacctgat

SEQ ID NO: 3403 - DNA, 104 bp, Homo sapiens
  misc_feature (1)...(104): n = A,T,C or G
ctgctacatgctgagctttgtgatnnaccacatgtnaannnangtgtgagcccccctccttagctaaacagacctatgnaataaaaaagtaattcaaaccaaaa

SEQ ID NO: 3404 - DNA, 104 bp, Homo sapiens
  misc_feature (1)...(104): n = A,T,C or G
cacctgcacgccagagggagaagagcccgcagggatttgtctagcttgcngttaccnaatgtcatggaagccataaactgttngaactatacacaaaaagaaat

SEQ ID NO: 3405 - DNA, 104 bp, Homo sapiens
  misc_feature (1)...(104): n = A,T,C or G
ggggggggcggggggggngtgggttggtgggttttcgcnggtgntgtgtngttttnggtttgtgttggtgtttttgnttttggtngttgttgtttgggggttat

SEQ ID NO: 3406 - DNA, 104 bp, Homo sapiens
  misc_feature (1)...(104): n = A,T,C or G
gaccatgaggatcctaaggaccaaactcaggnattnatgcttggcaccaggtacctttacgcnctganccatttgagactccnaanttataaaatgccttacaa

SEQ ID NO: 3407 - DNA, 103 bp, Homo sapiens
  misc_feature (1)...(103): n = A,T,C or G
ggtgggtttgggtctgtngtaaacctgggcagtngccttattacttcttgtggcaactctcaaggtcggccagggaagcatggctggttccataaaaaaaaaa

SEQ ID NO: 3408 - DNA, 103 bp, Homo sapiens
  misc_feature (1)...(103): n = A,T,C or G
tgtcaggacctggccacctgngtttgntatntgcnnctcacatcggggcaacaagcaggcatcaactctgctgtagtggtcttctggctccacgtgggcatgc

SEQ ID NO: 3409 - DNA, 103 bp, Homo sapiens
  misc_feature (1)...(103): n = A,T,C or G
aggatgggattggggttttgggtctgtgggttanaagcctgggtccannaggccatnaattactttcttatggnaactctccaaggtgctagacaaaaaaaaa

SEQ ID NO: 3410 - DNA, 103 bp, Homo sapiens
  misc_feature (1)...(103): n = A,T,C or G
ccttcctgctgcatttcgttctgccccggcccactgctgggaacnctgtaggtagncacacacgngcacctttactnctgggccagaggattattcggggggg

SEQ ID NO: 3411 - DNA, 103 bp, Homo sapiens
  misc_feature (1)...(103): n = A,T,C or G
tgctacagacagacacanagctggagcaggntggaccggtggagacgggtacaggtcgcnccnaacgagccctgttgaggnaccctataccatggcgacgggc

SEQ ID NO: 3412 - DNA, 102 bp, Homo sapiens
  misc_feature (1)...(102): n = A,T,C or G
ctgaggtagcagcctggncntaggccataatcncttcttgnggaactctcnacggcacngacaggangcatggcangggtccatatatctactgcctcgaat

SEQ ID NO: 3413 - DNA, 102 bp, Homo sapiens
  misc_feature (1)...(102): n = A,T,C or G
atggattcttaggcaggnaagtagggaccnngtttcanncttnancgccncaggnatcttgtttgtactgtcaccntcctggaccaagaggttcatgaccca

SEQ ID NO: 3414 - DNA, 102 bp, Homo sapiens
  misc_feature (1)...(102): n = A,T,C or G
tctccccctccccagtnaaggggtttttccttngccagnattttaattcccggccngaaaacttnaccttttngtccagtttgggggtttccttttgccgga

SEQ ID NO: 3415 - DNA, 102 bp, Homo sapiens
  misc_feature (1)...(102): n = A,T,C or G
tgacaaccgtcagggcgcagggcccagccaggggccaggatctgtaggagatgcactttgggaatatcctcgaaacaagcnntaaactgatgccacgaaaaa

SEQ ID NO: 3416 - DNA, 102 bp, Homo sapiens
  misc_feature (1)...(102): n = A,T,C or G
cagttctgtcatcctagcccttgagaggctgagtcagggactatccgccnagagctangctttgctctangnnagtgtncaggccaccctaggctactaagg

SEQ ID NO: 3417 - DNA, 102 bp, Homo sapiens
  misc_feature (1)...(102): n = A,T,C or G
ggtgggtttgggctgngtagtacctgggcagnagccttantacttcttgtggaactctcaangtcgggcagggaagcatggctggttccatataaaaaaaaa

SEQ ID NO: 3418 - DNA, 101 bp, Homo sapiens
  misc_feature (1)...(101): n = A,T,C or G
ctctgccctagcggtgcactgctcttaacacgcttgctacctgnaccaaanattattcaggcgganaatntgggtcccctccccnttccttcataacttgg

SEQ ID NO: 3419 - DNA, 101 bp, Homo sapiens
  misc_feature (1)...(101): n = A,T,C or G
ggagtgacctgggtgganccanggcaaagaggaccnggatgangagccgnnccaggtcctggaggncaagaggtgngcttanctccatggggaaccaggca

SEQ ID NO: 3420 - DNA, 101 bp, Homo sapiens
  misc_feature (1)...(101): n = A,T,C or G
ctcccaccaatctgcnagaagacactactagaatganngctnctntngtnaacactgctcagnacgngttattgnacttctcatacggaggaatgggactg

SEQ ID NO: 3421 - DNA, 101 bp, Homo sapiens
  misc_feature (1)...(101): n = A,T,C or G
cgggcgggggcccgcggggcaggcctccggggccgtcccccccnctcngcncttgcccctgngcctgnctctccgcttcacgcacaaaccaggcggtgcgg

SEQ ID NO: 3422 - DNA, 101 bp, Homo sapiens
  misc_feature (1)...(101): n = A,T,C or G
ctctagccatgaatactgnatnccataattancaacaagggcgtatatttgnagtgtgggggtcaacctaaacacacatgtatgngccggtgggggtacat

SEQ ID NO: 3423 - DNA, 101 bp, Homo sapiens
  misc_feature (1)...(101): n = A,T,C or G
ccctgagtgaaggagctganatcnaccacgccggctnccctgnantntgcncacgttattacaangatgaatctttttnggagcattcctccctatagcgc

1-4. (canceled)

7. A transgenic mouse whose genome comprises a disruption of a gene comprising SEQ ID NO: 15 and wherein said disruption results in a phenotype that differs from that of a wild-type mouse.
